(19) United States
(12) Patent Application Publication
(10) Pub. No.: US 2005/0214771 A1
(43) Pub. Date: Sep. 29, 2005

(54) Methods for identifying risk of breast cancer and treatments thereof

(76) Inventors: Richard B. Roth, La Jolla, CA (US); Andreas Braun, San Diego, CA (US); Stefan M. Kammerer, San Diego, CA (US); Matthew R. Nelson, San Marcos, CA (US); Rikard H. Reneland, San Diego, CA (US)

Correspondence Address: BIOTECHNOLOGY LAW GROUP, c/o PORTFOLIO IP, P.O. BOX 52050, MINNEAPOLIS, MN, 55402, US

(21) Appl. No.: 10/722,939

(22) Filed: Nov. 25, 2003

Related U.S. Application Data
(60) Provisional application No. 60/429,136, filed on Nov. 25, 2002.
(60) Provisional application No. 60/490,234, filed on Jul. 24, 2003.

(51) Int. Cl. C12Q 1/68

(52) U.S. Cl. 435/6

(57) ABSTRACT

Provided herein are methods for identifying risk of breast cancer in a subject and/or a subject at risk of breast cancer, reagents and kits for carrying out the methods, methods for identifying candidate therapeutics for treating breast cancer, and therapeutic methods for treating breast cancer in a subject. These embodiments are based upon an analysis of polymorphic variations in nucleotide sequences within the human genome.

### RELATED PATENT APPLICATIONS

[0001] This patent application claims the benefit of provisional patent application No. 60/429,136 filed Nov. 25, 2002 and provisional patent application No. 60/490,234 filed Jul. 24, 2003, having attorney docket No. 524593004100 and 524593004101, respectively. Each of these provisional patent applications names Richard B. Roth et al. as inventors and is hereby incorporated herein by reference in its entirety, including all drawings and cited publications and documents.

### FIELD OF THE INVENTION

[0002] The invention relates to genetic methods for identifying risk of breast cancer and treatments that specifically target the disease.

### BACKGROUND

[0003] Breast cancer is the third most common cancer, and the most common cancer in women, as well as a cause of disability, psychological trauma, and economic loss. Breast cancer is the second most common cause of cancer death in women in the United States, in particular for women between the ages of 15 and 54, and the leading cause of cancer-related death (Forbes, Seminars in Oncology, vol. 24(1), Suppl 1, 1997: pp. S1-20-S1-35). Indirect effects of the disease also contribute to the mortality from breast cancer including consequences of advanced disease, such as metastases to the bone or brain. Complications arising from bone marrow suppression, radiation fibrosis and neutropenic sepsis, collateral effects from therapeutic interventions, such as surgery, radiation, chemotherapy, or bone marrow transplantation—also contribute to the morbidity and mortality from this disease.

[0004] While the pathogenesis of breast cancer is unclear, transformation of normal breast epithelium to a malignant phenotype may be the result of genetic factors, especially in women under thirty (Miki, et al., Science, 266: 66-71 (1994)). However, it is likely that other, non-genetic factors also have a significant effect on the etiology of the disease. Regardless of its origin, breast cancer morbidity increases significantly if it is not detected early in its progression. Thus, considerable efforts have focused on the elucidation of early cellular events surrounding transformation in breast tissue. Such efforts have led to the identification of several potential breast cancer markers. For example, alleles of the BRCA1 and BRCA2 genes have been linked to hereditary and early-onset breast cancer (Wooster, et al., Science, 265: 2088-2090 (1994)). However, BRCA1 is limited as a cancer marker because BRCA1 mutations fail to account for the majority of breast cancers (Ford, et al., British J. Cancer, 72: 805-812 (1995)). Similarly, the BRCA2 gene, which has been linked to forms of hereditary breast cancer, accounts for only a small portion of total breast cancer cases.

### SUMMARY

[0005] It has been discovered that certain polymorphic variations in human genomic DNA are associated with the occurrence of breast cancer. In particular, polymorphic variants in loci containing DLG1, KIAA0783, DPF3 and CENPC1 regions in human genomic DNA have been associated with risk of breast cancer.

[0006] Thus, featured herein are methods for identifying a subject at risk of breast cancer and/or a risk of breast cancer in a subject, which comprises detecting the presence or absence of one or more polymorphic variations associated with breast cancer in genomic regions described herein in a human nucleic acid sample. In an embodiment, two or more polymorphic variations are detected in two or more regions selected from the group consisting of DLG1, KIAA0783, DPF3 and CENPC1. In certain embodiments, 3 or fewer, or 4, 5, 6, 7, 8, 9, 10, 11, 12, 13, 14, 15, 16, 17, 18, 19 or 20 or fewer polymorphic variants are detected.

[0007] Also featured are nucleic acids that include one or more polymorphic variations associated with the occurrence of breast cancer, as well as polypeptides encoded by these nucleic acids. Further, provided is a method for identifying a subject at risk of breast cancer and then prescribing to the subject a breast cancer detection procedure, prevention procedure and/or a treatment procedure. In addition, provided are methods for identifying candidate therapeutic molecules for treating breast cancer and related disorders, as well as methods for treating breast cancer in a subject by diagnosing breast cancer in the subject and treating the subject with a suitable treatment, such as administering a therapeutic molecule.

[0008] Also provided are compositions comprising a breast cancer cell and/or DLG1, KIAA0783, DPF3 or CENPC1 nucleic acid with a RNAi, siRNA, antisense DNA or RNA, or ribozyme nucleic acid designed from a DLG1, KIAA0783, DPF3 or CENPC1 nucleotide sequence. In an embodiment, the nucleic acid is designed from a DLG1, KIAA0783, DPF3 or CENPC1 nucleotide sequence that includes one or more breast cancer associated polymorphic variations, and in some instances, specifically interacts with such a nucleotide sequence. Further, provided are arrays of nucleic acids bound to a solid surface, in which one or more nucleic acid molecules of the array have a DLG1, KIAA0783, DPF3 or CENPC1 nucleotide sequence, or a fragment or substantially identical nucleic acid thereof, or a complementary nucleic acid of the foregoing. Featured also are compositions comprising a breast cancer cell and/or a DLG1, KIAA0783, DPF3 or CENPC1 polypeptide, with an antibody that specifically binds to the polypeptide. In an embodiment, the antibody specifically binds to an epitope in the polypeptide that includes a non-synonymous amino acid modification associated with breast cancer (e.g., results in an amino acid substitution in the encoded polypeptide associated with breast cancer). In certain embodiments, the antibody specifically binds to an epitope that comprises a glutamine at amino acid position 278 in SEQ ID NO: 9 of a DLG1 polypeptide or a glycine at amino acid position 389 in SEQ ID NO: 12 of a CENPC1 polypeptide.

### BRIEF DESCRIPTION OF THE FIGURES

[0009] FIGS. 1A-1T show a genomic nucleotide sequence for an DLG1 region. The genomic nucleotide sequence is set forth in SEQ ID NO: 1. The following nucleotide representations are used throughout: “A” or “a” is adenosine, adenine, or adenylic acid; “C” or “c” is cytidine, cytosine, or cytidylic acid; “G” or “g” is guanosine, guanine, or guanylic acid; “T” or “t” is thymidine, thymine, or thymidylic acid; and “I” or “i” is inosine, hypoxanthine, or inosinic acid. Exons are indicated in italicized lower case type, introns are depicted in normal text lower case type, and polymorphic sites are depicted in bold upper case type. SNPs are designated by the following convention: “R” represents A or G, “M” represents A or C; “W” represents A or T; “Y” represents C or T; “S” represents C or G; “K” represents G or T; “V” represents A, C or G; “H” represents A, C, or T; “D” represents A, G, or T; “B” represents C, G, or T; and “N” represents A, G, C, or T.

[0010] FIGS. 2A-2Z show a genomic nucleotide sequence of a KIAA0783 region. The genomic nucleotide sequence is set forth in SEQ ID NO: 2.

[0011] FIGS. 3A-3X show a genomic nucleotide sequence of a DPF3 region. The genomic nucleotide sequence is set forth in SEQ ID NO: 3.

[0012] FIGS. 4A-4Y show a genomic nucleotide sequence of a CENPC1 region. The genomic nucleotide sequence is set forth in SEQ ID NO: 4.

[0013] FIG. 5 shows a coding nucleotide sequence (cDNA) for DLG1. The nucleotide sequence is set forth in SEQ ID NO: 5.

[0014] FIG. 6 shows a coding nucleotide sequence (cDNA) for KIAA0783. The nucleotide sequence is set forth in SEQ ID NO: 6.

[0015] FIG. 7 shows a coding nucleotide sequence (cDNA) for DPF3. The nucleotide sequence is set forth in SEQ ID NO: 7.

[0016] FIG. 8 shows a coding nucleotide sequence (cDNA) for CENPC1. The nucleotide sequence is set forth in SEQ ID NO: 8.

[0017] FIG. 9 shows an amino acid sequence for a DLG1 polypeptide, which is set forth in SEQ ID NO: 9.

[0018] FIG. 10 shows an amino acid sequence for a KIAA0783 polypeptide, which is set forth in SEQ ID NO: 10.

[0019] FIG. 11 shows an amino acid sequence for a DPF3 polypeptide, which is set forth in SEQ ID NO: 11.

[0020] FIG. 12 shows an amino acid sequence for a CENPC1 polypeptide, which is set forth in SEQ ID NO: 12.

[0021] FIGS. 13-16 show proximal SNPs in DLG1, KIAA0783, DPF3 and CENPC1 loci in genomic DNA. The position of each SNP on the chromosome is shown on the x-axis and the y-axis provides the negative logarithm of the p-value comparing the estimated allele to that of the control group. Also shown in the figure are exons and introns of the genes in the approximate chromosomal positions. The figure indicates that polymorphic variants associated with breast cancer are in linkage disequilibrium in the following regions: the region spanning positions 7938-59808 in SEQ ID NO: 1; the region spanning positions 10511-98107 in SEQ ID NO: 2; the region spanning positions 160-72752 in SEQ ID NO: 3; and the region spanning positions 196-74909 in SEQ ID NO: 4.

### DETAILED DESCRIPTION

[0022] It has been discovered that polymorphic variations in the DLG1, KIAA0783, DPF3 and CENPC1 regions described herein are associated with an increased risk of breast cancer.

[0023] The gene DLG1 (discs, large homolog 1 (Drosophila)) is also referenced as synapse-associated protein 97, hdlg, SAP97. DLG1 has been mapped to chromosomal position 3-q29. In Drosophila more than 50 genes have been identified that lead to loss of cell proliferation control, indicating that they are tumor suppressor genes. Many of these genes have been cloned and sequenced, and most have clear mammalian homologs. The Drosophila ‘discs large’ tumor suppressor protein, Dlg, is the prototype of a family of proteins termed MAGUKs (membrane-associated guanylate kinase homologs). MAGUKs are localized at the membrane-cytoskeleton interface, usually at cell-cell junctions, where they appear to have both structural and signaling roles. They contain several distinct domains, including a modified guanylate kinase domain, an SH3 motif, and 1 or 3 copies of the DHR (GLGF/PDZ) domain. Recessive lethal mutations in the ‘discs large’ tumor suppressor gene interfere with the formation of septate junctions (thought to be the arthropod equivalent of tight junctions) between epithelial cells, and they also cause neoplastic overgrowth of imaginal discs, suggesting a role for cell junctions in proliferation control.

[0024] The gene KIAA0783 also is known as PHF14 and PHD finger protein 14. KIAA0783 has been mapped to chromosomal position 7p21.3. The protein encoded by this gene is a novel gene with unknown function. Being a zinc finger protein, it likely a transcription factor.

[0025] The gene DPF3 (D4, zinc and double PHD fingers, family 3) also is known as CERD4, cer-d4, FLJ14079, and 2810403B03Rik. DPF3 is a Rho family guanine-nucleotide exchange factor. DPF3 has been mapped to chromosomal position 14q24.3-q31.1.

[0026] The gene CENPC1 (centromere protein C1) also is known as Centromere autoantigen C1. CENPC1 has been mapped to chromosomal position 4q12-q13.3. CENPC1 is a centromere autoantigen and a component of the inner kinetochore plate. The protein is required for maintaining proper kinetochore size and a timely transition to anaphase. A putative pseudogene exists on chromosome 12.

[0027] Breast Cancer and Sample Selection

[0028] Breast cancer is typically described as the uncontrolled growth of malignant breast tissue. Breast cancers arise most commonly in the lining of the milk ducts of the breast (ductal carcinoma), or in the lobules where breast milk is produced (lobular carcinoma). Other forms of breast cancer include Inflammatory Breast Cancer and Recurrent Breast Cancer. Inflammatory breast cancer is a rare, but very serious, aggressive type of breast cancer. The breast may look red and feel warm with ridges, welts, or hives on the breast; or the skin may look wrinkled. It is sometimes misdiagnosed as a simple infection. Recurrent disease means that the cancer has come back after it has been treated. It may come back in the breast, in the soft tissues of the chest (the chest wall), or in another part of the body.

[0029] As used herein, the term “breast cancer” refers to a condition characterized by anomalous rapid proliferation of abnormal cells in one or both breasts of a subject. The abnormal cells often are referred to as “neoplastic cells,” which are transformed cells that can form a solid tumor. The term “tumor” refers to an abnormal mass or population of cells (i.e. two or more cells) that result from excessive or abnormal cell division, whether malignant or benign, and pre-cancerous and cancerous cells. Malignant tumors are distinguished from benign growths or tumors in that, in addition to uncontrolled cellular proliferation, they can invade surrounding tissues and can metastasize. In breast cancer, neoplastic cells may be identified in one or both breasts only and not in another tissue or organ, in one or both breasts and one or more adjacent tissues or organs (e.g. lymph node), or in a breast and one or more non-adjacent tissues or organs to which the breast cancer cells have metastasized.

[0030] The term “invasion” as used herein refers to the spread of cancerous cells to adjacent surrounding tissues. The term “invasion” often is used synonymously with the term “metastasis,” which as used herein refers to a process in which cancer cells travel from one organ or tissue to another non-adjacent organ or tissue. Cancer cells in the breast(s) can spread to tissues and organs of a subject, and conversely, cancer cells from other organs or tissue can invade or metastasize to a breast. Cancerous cells from the breast(s) may invade or metastasize to any other organ or tissue of the body. Breast cancer cells often invade lymph node cells and/or metastasize to the liver, brain and/or bone and spread cancer in these tissues and organs. Breast cancers can spread to other organs and tissues and cause lung cancer, prostate cancer, colon cancer, ovarian cancer, cervical cancer, gastrointestinal cancer, pancreatic cancer, glioblastoma, bladder cancer, hepatoma, colorectal cancer, uterine cervical cancer, endometrial carcinoma, salivary gland carcinoma, kidney cancer, vulval cancer, thyroid cancer, hepatic carcinoma, skin cancer, melanoma, ovarian cancer, neuroblastoma, myeloma, various types of head and neck cancer, acute lymphoblastic leukemia, acute myeloid leukemia, Ewing sarcoma and peripheral neuroepithelioma, and other carcinomas, lymphomas, blastomas, sarcomas, and leukemias.

[0031] Breast cancers arise most commonly in the lining of the milk ducts of the breast (ductal carcinoma), or in the lobules where breast milk is produced (lobular carcinoma). Other forms of breast cancer include Inflammatory Breast Cancer and Recurrent Breast Cancer. Inflammatory Breast Cancer is a rare, but very serious, aggressive type of breast cancer. The breast may look red and feel warm with ridges, welts, or hives on the breast; or the skin may look wrinkled. It is sometimes misdiagnosed as a simple infection. Recurrent disease means that the cancer has come back after it has been treated. It may come back in the breast, in the soft tissues of the chest (the chest wall), or in another part of the body. As used herein, the term “breast cancer” may include both Inflammatory Breast Cancer and Recurrent Breast Cancer.

[0032] In an effort to detect breast cancer as early as possible, regular physical exams and screening mammograms often are prescribed and conducted. A diagnostic mammogram often is performed to evaluate a breast complaint or abnormality detected by physical exam or routine screening mammography. If an abnormality seen with diagnostic mammography is suspicious, additional breast imaging (with exams such as ultrasound) or a biopsy may be ordered. A biopsy followed by pathological (microscopic) analysis is a definitive way to determine whether a subject has breast cancer. Excised breast cancer samples often are subjected to the following analyses: diagnosis of the breast tumor and confirmation of its malignancy; maximum tumor thickness; assessment of completeness of excision of invasive and in situ components and microscopic measurements of the shortest extent of clearance; level of invasion; presence and extent of regression; presence and extent of ulceration; histological type and special variants; pre-existing lesion; mitotic rate; vascular invasion; neurotropism; cell type; tumor lymphocyte infiltration; and growth phase.

[0033] The stage of a breast cancer can be classified as a range of stages from Stage 0 to Stage IV based on its size and the extent to which it has spread. The following table summarizes the stages:

TABLE A

| | | | Metastasis |
|---|---|---|---|
| Stage | Tumor Size | Lymph Node Involvement | (Spread) |
| I | Less than 2 cm | No | No |
| II | Between 2-5 cm | No or in same side of | No |
| | | breast | |
| III | More than 5 cm | Yes, on same side of | No |
| | | breast | |
| IV | Not applicable | Not applicable | Yes |

[0034] Stage 0 cancer is a contained cancer that has not spread beyond the breast ductal system. Fifteen to twenty percent of breast cancers detected by clinical examinations or testing are in Stage 0 (the earliest form of breast cancer). Two types of Stage 0 cancer are lobular carcinoma in situ (LCIS) and ductal carcinoma in situ (DCIS). LCIS indicates high risk for breast cancer. Many physicians do not classify LCIS as a malignancy and often encounter LCIS by chance on breast biopsy while investigating another area of concern. While the microscopic features of LCIS are abnormal and are similar to malignancy, LCIS does not behave as a cancer (and therefore is not treated as a cancer). LCIS is merely a marker for a significantly increased risk of cancer anywhere in the breast. However, bilateral simple mastectomy may be occasionally performed if LCIS patients have a strong family history of breast cancer. In DCIS the cancer cells are confined to milk ducts in the breast and have not spread into the fatty breast tissue or to any other part of the body (such as the lymph nodes). DCIS may be detected on mammogram as tiny specks of calcium (known as microcalcifications) 80% of the time. Less commonly DCIS can present itself as a mass with calcifications (15% of the time); and even less likely as a mass without calcifications (<5% of the time). A breast biopsy is used to confirm DCIS. A standard DCIS treatment is breast-conserving therapy (BCT), which is lumpectomy followed by radiation treatment or mastectomy. To date, DCIS patients have chosen equally among lumpectomy and mastectomy as their treatment option, though specific cases may sometimes favor lumpectomy over mastectomy or vice versa.

[0035] In Stage I, the primary (original) cancer is 2 cm or less in diameter and has not spread to the lymph nodes. In Stage IIA, the primary tumor is between 2 and 5 cm in diameter and has not spread to the lymph nodes. In Stage IIB, the primary tumor is between 2 and 5 cm in diameter and has spread to the axillary (underarm) lymph nodes; or the primary tumor is over 5 cm and has not spread to the lymph nodes. In Stage IIIA, the primary breast cancer of any kind that has spread to the axillary (underarm) lymph nodes and to axillary tissues. In Stage IIIB, the primary breast cancer is any size, has attached itself to the chest wall, and has spread to the pectoral (chest) lymph nodes. In Stage IV, the primary cancer has spread out of the breast to other parts of the body (such as bone, lung, liver, brain). The treatment of Stage IV breast cancer focuses on extending survival time and relieving symptoms.

[0036] Based in part upon selection criteria set forth above, individuals having breast cancer can be selected for genetic studies. Also, individuals having no history of cancer or breast cancer often are selected for genetic studies. Other selection criteria can include: a tissue or fluid sample is derived from an individual characterized as Caucasian; the sample was derived from an individual of German paternal and maternal descent; the database included relevant phenotype information for the individual; case samples were derived from individuals diagnosed with breast cancer; control samples were derived from individuals free of cancer and no family history of breast cancer; and sufficient genomic DNA was extracted from each blood sample for all allelotyping and genotyping reactions performed during the study. Phenotype information included pre- or post-menopausal, familial predisposition, country or origin of mother and father, diagnosis with breast cancer (date of primary diagnosis, age of individual as of primary diagnosis, grade or stage of development, occurrence of metastases, e.g., lymph node metastases, organ metastases), condition of body tissue (skin tissue, breast tissue, ovary tissue, peritoneum tissue and myometrium), method of treatment (surgery, chemotherapy, hormone therapy, radiation therapy).

[0037] Provided herein is a set of blood samples and a set of corresponding nucleic acid samples isolated from the blood samples, where the blood samples are donated from individuals diagnosed with breast cancer. The sample set often includes blood samples or nucleic acid samples from 100 or more, 150 or more, or 200 or more individuals having breast cancer, and sometimes from 250 or more, 300 or more, 400 or more, or 500 or more individuals. The individuals can have parents from any place of origin, and in an embodiment, the set of samples are extracted from individuals of German paternal and German maternal ancestry. The samples in each set may be selected based upon five or more criteria and/or phenotypes set forth above.

[0038] Polymorphic Variants Associated with Breast Cancer

[0039] A genetic analysis provided herein linked breast cancer with polymorphic variants in the DLG1, KIAA0783, DPF3 and CENPC1 regions of the human genome disclosed herein. As used herein, the term “polymorphic site” refers to a region in a nucleic acid at which two or more alternative nucleotide sequences are observed in a significant number of nucleic acid samples from a population of individuals. A polymorphic site may be a nucleotide sequence of two or more nucleotides, an inserted nucleotide or nucleotide sequence, a deleted nucleotide or nucleotide sequence, or a microsatellite, for example. A polymorphic site that is two or more nucleotides in length may be 3, 4, 5, 6, 7, 8, 9, 10, 11, 12, 13, 14, 15 or more, 20 or more, 30 or more, 50 or more, 75 or more, 100 or more, 500 or more, or about 1000 nucleotides in length, where all or some of the nucleotide sequences differ within the region. A polymorphic site is often one nucleotide in length, which is referred to herein as a “single nucleotide polymorphism” or a “SNP.”

[0040] Where there are two, three, or four alternative nucleotide sequences at a polymorphic site, each nucleotide sequence is referred to as a “polymorphic variant” or “nucleic acid variant.” Where two polymorphic variants exist, for example, the polymorphic variant represented in a minority of samples from a population is sometimes referred to as a “minor allele” and the polymorphic variant that is more prevalently represented is sometimes referred to as a “major allele.” Many organisms possess a copy of each chromosome (e.g., humans), and those individuals who possess two major alleles or two minor alleles are often referred to as being “homozygous” with respect to the polymorphism, and those individuals who possess one major allele and one minor allele are normally referred to as being “heterozygous” with respect to the polymorphism. Individuals who are homozygous with respect to one allele are sometimes predisposed to a different phenotype as compared to individuals who are heterozygous or homozygous with respect to another allele.

[0041] Furthermore, a genotype or polymorphic variant may be expressed in terms of a “haplotype,” which as used herein refers to two or more polymorphic variants occurring within genomic DNA in a group of individuals within a population. For example, two SNPs may exist within a gene where each SNP position includes a cytosine variation and an adenine variation. Certain individuals in a population may carry one allele (heterozygous) or two alleles (homozygous) having the gene with a cytosine at each SNP position. As the two cytosines corresponding to each SNP in the gene travel together on one or both alleles in these individuals, the individuals can be characterized as having a cytosine/cytosine haplotype with respect to the two SNPs in the gene.

[0042] As used herein, the term “phenotype” refers to a trait which can be compared between individuals, such as presence or absence of a condition, a visually observable difference in appearance between individuals, metabolic variations, physiological variations, variations in the function of biological molecules, and the like. An example of a phenotype is occurrence of breast cancer.

[0043] Researchers sometimes report a polymorphic variant in a database without determining whether the variant is represented in a significant fraction of a population. Because a subset of these reported polymorphic variants are not represented in a statistically significant portion of the population, some of them are sequencing errors and/or not biologically relevant. Thus, it is often not known whether a reported polymorphic variant is statistically significant or biologically relevant until the presence of the variant is detected in a population of individuals and the frequency of the variant is determined. Methods for detecting a polymorphic variant in a population are described herein, specifically in Example 2. A polymorphic variant is statistically significant and often biologically relevant if it is represented in 5% or more of a population, sometimes 10% or more, 15% or more, or 20% or more of a population, and often 25% or more, 30% or more, 35% or more, 40% or more, 45% or more, or 50% or more of a population.

[0044] A polymorphic variant may be detected on either or both strands of a double-stranded nucleic acid. For example, a thymine at a particular position in SEQ ID NO: 1 can be reported as an adenine from the complementary strand. Also, a polymorphic variant may be located within an intron or exon of a gene or within a portion of a regulatory region such as a promoter, a 5′ untranslated region (UTR), a 3′ UTR, and in DNA (e.g., genomic DNA (gDNA) and complementary DNA (cDNA)), RNA (e.g., mRNA, tRNA, and rRNA), or a polypeptide. Polymorphic variations may or may not result in detectable differences in gene expression, polypeptide structure, or polypeptide function.

[0045] In the genetic analysis that associated breast cancer with the polymorphic variants described hereafter, samples from individuals having breast cancer and individuals not having cancer were allelotyped and genotyped. The term “genotyped” as used herein refers to a process for determining a genotype of one or more individuals, where a “genotype” is a representation of one or more polymorphic variants in a population. Genotypes may be expressed in terms of a “haplotype,” which as used herein refers to two or more polymorphic variants occurring within genomic DNA in a group of individuals within a population. For example, two SNPs may exist within a gene where each SNP position includes a cytosine variation and an adenine variation. Certain individuals in a population may carry one allele (heterozygous) or two alleles (homozygous) having the gene with a cytosine at each SNP position. As the two cytosines corresponding to each SNP in the gene travel together on one or both alleles in these individuals, the individuals can be characterized as having a cytosine/cytosine haplotype with respect to the two SNPs in the gene.

[0046] It was determined that polymorphic variations associated with an increased risk of breast cancer existed in DLG1, KIAA0783, DPF3 or CENPC1 nucleotide sequences. Polymorphic variants in and around the DLG1, KIAA0783, DPF3 and CENPC1 loci were tested for association with breast cancer. In the DLG1 locus, these included polymorphic variants at positions in SEQ ID NO: 1 selected from the group consisting of 133, 7938, 8873, 13221, 17288, 25732, 26923, 39977, 41284, 41410, 41477, 41514, 42606, 42742, 59515, 59808, 60265, 67152, 68332, 71128 and 76427. Polymorphic variants in a region spanning positions 7938-59808 in SEQ ID NO: 1 in particular were associated with an increased risk of breast cancer, including polymorphic variants at positions 7938, 26923, 39977 and 59808 in SEQ ID NO: 1. At these positions in SEQ ID NO: 1, a thymine at position 7938, a cytosine at position 26923, a thymine at position 39977 and a thymine at position 59808 in particular were associated with risk of breast cancer. Also, a glutamine at position 278 in SEQ ID NO: 9 in a DLG1 polypeptide in particular was associated with an increased risk of breast cancer.

[0047] In the KIAA0783 locus, these included polymorphic variants at positions in SEQ ID NO: 2 selected from the group consisting of 201, 6395, 8558, 9429, 9809, 10072, 10511, 11556, 16857, 16951, 17027, 17177, 17615, 17950, 18329, 18384, 18561, 18579, 18871, 27152, 27306, 28091, 28661, 29011, 29962, 29969, 30085, 31656, 31685, 31749, 45389, 45459, 46647, 49860, 53061, 57308, 61563, 61660, 62212, 67090, 67198, 70071, 70191, 74006, 75600, 85761, 90798, 90883, 91259, 95416, 95446, 96368, 97050, 97362, 97630, 97989 and 98107. Polymorphic variants in a region spanning positions 10511-98107 in SEQ ID NO: 2 in particular were associated with an increased risk of breast cancer, including polymorphic variants at positions 10511, 11556, 17177, 18384, 28661, 31656, 31685, 31749, 45389, 45459, 46647, 49860, 53061, 57308, 61563, 61660, 67090, 67198, 70071, 74006, 75600, 85761, 90798, 90883, 91259, 95416, 95446, 96368, 97362, 97630, 97989 and 98107 in SEQ ID NO: 2. At these positions in SEQ ID NO: 2, a thymine at position 10511, a cytosine at position 11556, a thymine at position 17177, a thymine at position 18384, an adenine at position 28661, an adenine at position 31656, an adenine at position 31685, a guanine at position 31749, a thymine at position 45389, a guanine at position 45459, an adenine at position 46647, a thymine at position 49860, a thymine at position 53061, an adenine at position 57308, a guanine at position 61563, a guanine at position 61660, a guanine at position 67090, a cytosine at position 67198, an adenine at position 70071, a cytosine at position 74006, an adenine at position 75600, a guanine at position 85761, a thymine at poisition 90798, a cytosine at position 90883, an adenine at position 91259, a cytosine at position 95416, a thymine at position 95446, a thymine at position 96368, a thymine at position 97362, an adenine at position 97630, a cytosine at position 97989 and a thymine at position 98107 in particular were associated with increased risk of breast cancer.

[0048] In the DPF3 locus, these included polymorphic variants at positions in SEQ ID NO: 3 selected from the group consisting of 160, 6053, 9719, 10481, 10676, 17179, 18561, 18658, 18694, 18858, 24582, 24683, 24767, 27402, 28150, 28494, 32003, 35588, 35619, 35856, 36254, 37314, 40033, 40095, 42593, 42799, 43090, 46683, 49774, 51796, 52079, 53857, 53971, 55899, 60682, 61291, 72720, 72752, 85507 and 89751. Polymorphic variants in a region spanning positions 160-72752 in SEQ ID NO: 3 in particular were associated with an increased risk of breast cancer, including polymorphic variants at positions 160, 6053, 18658, 18694, 18858, 24683, 27402, 28494, 32003, 35588, 35856, 40095, 46683, 52079, 53857, 72720 and 72752 in SEQ ID NO: 3. At these positions in SEQ ID NO: 3, an adenine at position 160, a guanine at position 6053, a guanine at position 18658, a guanine at position 18694, a thymine at position 18858, a guanine at position 24683, a guanine at position 27402, a thymine at position 28494, an adenine at position 32003, a cytosine at position 35588, an adenine at position 35856, a guanine at position 40095, an adenine at position 46683, an adenine at position 52079, a cytosine at position 53857, an adenine at position 72720 and a cytosine at position 72752 in particular were associated with an increased risk of breast cancer.

[0049] In the CENPC1 locus, these included polymorphic variants at positions in SEQ ID NO: 4 selected from the group consisting of 196, 13311, 14486, 14691, 15551, 17702, 17872, 19588, 19910, 20006, 20575, 21092, 22830, 23455, 23716, 23890, 24001, 24995, 27282, 27779, 29099, 31185, 33994, 34942, 35137, 36538, 37139, 37358, 38828, 39469, 40233, 40472, 41679, 41682, 42831, 42976, 44128, 44195, 46769, 47363, 48843, 52574, 52602, 53212, 53781, 54710, 55808, 57987, 58556, 59148, 59286, 60217, 60412, 60753, 60791, 61524, 62543, 62825, 62826, 62857, 63400, 63960, 64307, 64539, 65728, 66000, 66521, 68185, 69643, 74909, 82973, 83039, 85713, 86873, 90293, 91810, 92609, 92884 and 42831. Polymorphic variants in a region spanning positions 196-74909 in SEQ ID NO: 4 in particular were associated with an increased risk of breast cancer, including polymorphic variants at positions 196, 13311, 14486, 19910, 20575, 23716, 23890, 24995, 29099, 33994, 34942, 37139, 40233, 40472, 42831, 42976, 44195, 48843, 58556, 59286, 60217, 62826, 62857, 63400, 63960 and 74909 in SEQ ID NO: 4. At these positions in SEQ ID NO: 4, an adenine at position 196, a guanine at position 13311, a thymine at position 14486, a thymine at position 19910, an adenine at position 20575, a guanine at position 23716, a guanine at position 23890, an adenine at position 24995, a cytosine at position 29099, a thymine at position 33994, a thymine at position 34942, a thymine at position 37139, a thymine at position 40233, an adenine at position 40472, a guanine at position 42831, a guanine at position 42976, a thymine at position 44195, a thymine at position 48843, an adenine at position 58556, a guanine at position 59286, an adenine at position 60217, a cytosine at position 62826, a thymine at position 62857, a thymine at position 63400, an adenine at position 63960 and a cytosine at position 74909 in particular were associated with an increased risk of breast cancer. Also, a glycine at position 389 in SEQ ID NO: 12 in a CENPC1 polypeptide in particular was associated with an increased risk of breast cancer.

[0050] Additional Polymorphic Variants Associated with Breast Cancer

[0051] Also provided is a method for identifying polymorphic variants proximal to an incident, founder polymorphic variant associated with breast cancer. Thus, featured herein are methods for identifying a polymorphic variation associated with breast cancer that is proximal to an incident polymorphic variation associated with breast cancer, which comprises identifying a polymorphic variant proximal to the incident polymorphic variant associated with breast cancer, where the incident polymorphic variant is in a nucleotide sequence set forth in SEQ ID NO: 1-4. The nucleotide sequence often comprises a polynucleotide sequence selected from the group consisting of (a) a nucleotide sequence set forth in SEQ ID NO: 1-4; (b) a nucleotide sequence which encodes a polypeptide having an amino acid sequence encoded by a nucleotide sequence in SEQ ID NO: 1-4; (c) a nucleotide sequence which encodes a polypeptide that is 90% or more identical to an amino acid sequence encoded by a nucleotide sequence in SEQ ID NO: 1-4 or a nucleotide sequence about 90% or more identical to the nucleotide sequence set forth in SEQ ID NO: 1-4; and (d) a fragment of a nucleotide sequence of (a), (b), or (c), often a fragment that includes a polymorphic site associated with breast cancer. The presence or absence of an association of the proximal polymorphic variant with breast cancer then is determined using a known association method, such as a method described in the Examples hereafter. In an embodiment, the incident polymorphic variant is described in SEQ ID NO: 1-4. In another embodiment, the proximal polymorphic variant identified sometimes is a publicly disclosed polymorphic variant, which for example, sometimes is published in a publicly available database. In other embodiments, the polymorphic variant identified is not publicly disclosed and is discovered using a known method, including, but not limited to, sequencing a region surrounding the incident polymorphic variant in a group of nucleic acid samples. Thus, multiple polymorphic variants proximal to an incident polymorphic variant are associated with breast cancer using this method.

[0052] The proximal polymorphic variant often is identified in a region surrounding the incident polymorphic variant. In certain embodiments, this surrounding region is about 50 kb flanking the first polymorphic variant (e.g. about 50 kb 5′ of the first polymorphic variant and about 50 kb 3′ of the first polymorphic variant), and the region sometimes is composed of shorter flanking sequences, such as flanking sequences of about 40 kb, about 30 kb, about 25 kb, about 20 kb, about 15 kb, about 10 kb, about 7 kb, about 5 kb, or about 2 kb 5′ and 3′ of the incident polymorphic variant. In other embodiments, the region is composed of longer flanking sequences, such as flanking sequences of about 55 kb, about 60 kb, about 65 kb, about 70 kb, about 75 kb, about 80 kb, about 85 kb, about 90 kb; about 95 kb, or about 100 kb 5′ and 3′ of the incident polymorphic variant.

[0053] In certain embodiments, polymorphic variants associated with breast cancer are identified iteratively. For example, a first proximal polymorphic variant is associated with breast cancer using the methods described above and then another polymorphic variant proximal to the first proximal polymorphic variant is identified (e.g., publicly disclosed or discovered) and the presence or absence of an association of one or more other polymorphic variants proximal to the first proximal polymorphic variant with breast cancer is determined.

[0054] The methods described herein are useful for identifying or discovering additional polymorphic variants that may be used to further characterize a gene, region or loci associated with a condition, a disease (e.g., breast cancer), or a disorder. For example, allelotyping or genotyping data from the additional polymorphic variants may be used to identify a functional mutation or a region of linkage disequilibrium.

[0055] In certain embodiments, polymorphic variants identified or discovered within a region comprising the first polymorphic variant associated with breast cancer are genotyped using the genetic methods and sample selection techniques described herein, and it can be determined whether those polymorphic variants are in linkage disequilibrium with the first polymorphic variant. The size of the region in linkage disequilibrium with the first polymorphic variant also can be assessed using these genotyping methods. Thus, provided herein are methods for determining whether a polymorphic variant is in linkage disequilibrium with a first polymorphic variant associated with breast cancer, and such information can be used in prognosis methods described herein.

[0056] Isolated DLG1, KIAA0783, DPF3 or CENPC1 Nucleic Acids

[0057] Featured herein are isolated DLG1, KIAA0783, DPF3 or CENPC1 nucleic acids, which include the nucleic acid having the nucleotide sequence of SEQ ID NO: 1, 2, 3, 4, 5, 6, 7, 8, 9, 10 or 11, nucleic acid variants, and substantially identical nucleic acids of the foregoing. Nucleotide sequences of the DLG1, KIAA0783, DPF3 or CENPC1 nucleic acids sometimes are referred to herein as “DLG1, KIAA0783, DPF3 or CENPC1 nucleotide sequences.” A “DLG1, KIAA0783, DPF3 or CENPC1 nucleic acid variant” refers to one allele that may have one or more different polymorphic variations as compared to another allele in another subject or the same subject. A polymorphic variation in the DLG1, KIAA0783, DPF3 or CENPC1 nucleic acid variant may be represented on one or both strands in a double-stranded nucleic acid or on one chromosomal complement (heterozygous) or both chromosomal complements (homozygous).

[0058] As used herein, the term “nucleic acid” includes DNA molecules (e.g., a complementary DNA (cDNA) and genomic DNA (gDNA)) and RNA molecules (e.g., mRNA, rRNA, and tRNA) and analogs of DNA or RNA, for example, by use of nucleotide analogs. The nucleic acid molecule can be single-stranded and it is often double-stranded. The term “isolated or purified nucleic acid” refers to nucleic acids that are separated from other nucleic acids present in the natural source of the nucleic acid. For example, with regard to genomic DNA, the term “isolated” includes nucleic acids which are separated from the chromosome with which the genomic DNA is naturally associated. An “isolated” nucleic acid is often free of sequences which naturally flank the nucleic acid (i.e., sequences located at the 5′ and/or 3′ ends of the nucleic acid) in the genomic DNA of the organism from which the nucleic acid is derived. For example, in various embodiments, the isolated nucleic acid molecule can contain less than about 5 kb, 4 kb, 3 kb, 2 kb, 1 kb, 0.5 kb or 0.1 kb of 5′ and/or 3′ nucleotide sequences which flank the nucleic acid molecule in genomic DNA of the cell from which the nucleic acid is derived. Moreover, an “isolated” nucleic acid molecule, such as a cDNA molecule, can be substantially free of other cellular material, or culture medium when produced by recombinant techniques, or substantially free of chemical precursors or other chemicals when chemically synthesized. As used herein, the term “DLG1, KIAA0783, DPF3 or CENPC1 gene” refers to a nucleotide sequence that encodes a DLG1, KIAA0783, DPF3 or CENPC1 polypeptide.

[0059] Also included herein are nucleic acid fragments. These fragments typically are a nucleotide sequence identical to a nucleotide sequence in SEQ ID NO: 1-8, a nucleotide sequence substantially identical to a nucleotide sequence in SEQ ID NO: 1-8, or a nucleotide sequence that is complementary to the foregoing. The nucleic acid fragment may be identical, substantially identical or homologous to a nucleotide sequence in an exon or an intron in SEQ ID NO: 1-4, and may encode a domain or part of a domain or motif of a DLG1, KIAA0783, DPF3 or CENPC1 polypeptide, sometimes the domains set forth in FIGS. 13-18. Sometimes, the fragment comprises the polymorphic variation described herein as being associated with breast cancer. The nucleic acid fragment sometimes is 50, 100, or 200 or fewer base pairs in length, and is sometimes about 300, 400, 500, 600, 700, 800, 900, 1000, 1100, 1200, 1300, 1400, 1500, 1600, 1700, 1800, 1900, 2000, 2100, 2200, 2300, 2400, 2500, 2600, 2700, 2800, 2900, 3000, 3100, 3200, 3300, 3400, 3500, 3600, 3800, 4000, 5000, 6000, 7000, 8000, 9000, 10000, 15000, 20000, 30000, 40000, 50000, 60000, 70000, 80000, 90000, 100000, 110000, 120000, 130000, 140000, 150000 or 160000 base pairs in length. A nucleic acid fragment complementary to a nucleotide sequence identical or substantially identical to the nucleotide sequence of SEQ ID NO: 1-8 and hybridizes to such a nucleotide sequence under stringent conditions often is referred to as a “probe.” Nucleic acid fragments often include one or more polymorphic sites, or sometimes have an end that is adjacent to a polymorphic site as described hereafter.

[0060] An example of a nucleic acid fragment is an oligonucleotide. As used herein, the term “oligonucleotide” refers to a nucleic acid comprising about 8 to about 50 covalently linked nucleotides, often comprising from about 8 to about 35 nucleotides, and more often from about 10 to about 25 nucleotides. The backbone and nucleotides within an oligonucleotide may be the same as those of naturally occurring nucleic acids, or analogs or derivatives of naturally occurring nucleic acids, provided that oligonucleotides having such analogs or derivatives retain the ability to hybridize specifically to a nucleic acid comprising a targeted polymorphism. Oligonucleotides described herein may be used as hybridization probes or as components of prognostic or diagnostic assays, for example, as described herein.

[0061] Oligonucleotides are typically synthesized using standard methods and equipment, such as the ABI 3900 High Throughput DNA Synthesizer and the EXPEDITE™ 8909 Nucleic Acid Synthesizer, both of which are available from Applied Biosystems (Foster City, Calif.). Analogs and derivatives are exemplified in U.S. Pat. Nos. 4,469,863; 5,536,821; 5,541,306; 5,637,683; 5,637,684; 5,700,922; 5,717,083; 5,719,262; 5,739,308; 5,773,601; 5,886,165; 5,929,226; 5,977,296; 6,140,482; WO 00/56746; WO 01/14398, and related publications. Methods for synthesizing oligonucleotides comprising such analogs or derivatives are disclosed, for example, in the patent publications cited above and in U.S. Pat. Nos. 5,614,622; 5,739,314; 5,955,599; 5,962,674; 6,117,992; in WO 00/75372; and in related publications.

[0062] Oligonucleotides also may be linked to a second moiety. The second moiety may be an additional nucleotide sequence such as a tail sequence (e.g., a polyadenosine tail), an adapter sequence (e.g., phage M13 universal tail sequence), and others. Alternatively, the second moiety may be a non-nucleotide moiety such as a moiety which facilitates linkage to a solid support or a label to facilitate detection of the oligonucleotide. Such labels include, without limitation, a radioactive label, a fluorescent label, a chemiluminescent label, a paramagnetic label, and the like. The second moiety may be attached to any position of the oligonucleotide, provided the oligonucleotide can hybridize to the nucleic acid comprising the polymorphism.

Uses for Nucleic Acid Sequences

[0063] Nucleic acid coding sequences depicted in SEQ ID NO: 1-8 may be used for diagnostic purposes for detection and control of polypeptide expression. Also, included herein are oligonucleotide sequences such as antisense RNA, small-interfering RNA (siRNA) and DNA molecules and ribozymes that function to inhibit translation of a polypeptide. Antisense techniques and RNA interference techniques are known in the art and are described herein.

[0064] Ribozymes are enzymatic RNA molecules capable of catalyzing the specific cleavage of RNA. The mechanism of ribozyme action involves sequence specific hybridization of the ribozyme molecule to complementary target RNA, followed by a endonucleolytic cleavage. Ribozymes may be engineered hammerhead motif ribozyme molecules that specifically and efficiently catalyze endonucleolytic cleavage of RNA sequences corresponding to or complementary to the nucleotide sequences set forth in SEQ ID NO: 1-8. Specific ribozyme cleavage sites within any potential RNA target are initially identified by scanning the target molecule for ribozyme cleavage sites which include the following sequences, GUA, GUU and GUC. Once identified, short RNA sequences of between fifteen (15) and twenty (20) ribonucleotides corresponding to the region of the target gene containing the cleavage site may be evaluated for predicted structural features such as secondary structure that may render the oligonucleotide sequence unsuitable. The suitability of candidate targets may also be evaluated by testing their accessibility to hybridization with complementary oligonucleotides, using ribonuclease protection assays.

[0065] Antisense RNA and DNA molecules, siRNA and ribozymes may be prepared by any method known in the art for the synthesis of RNA molecules. These include techniques for chemically synthesizing oligodeoxyribonucleotides well known in the art such as solid phase phosphoramidite chemical synthesis. Alternatively, RNA molecules may be generated by in vitro and in vivo transcription of DNA sequences encoding the antisense RNA molecule. Such DNA sequences may be incorporated into a wide variety of vectors which incorporate suitable RNA polymerase promoters such as the T7 or SP6 polymerase promoters. Alternatively, antisense cDNA constructs that synthesize antisense RNA constitutively or inducibly, depending on the promoter used, can be introduced stably into cell lines.

[0066] DNA encoding a polypeptide also may have a number of uses for the diagnosis of diseases, including breast cancer, resulting from aberrant expression of a target gene described herein. For example, the nucleic acid sequence may be used in hybridization assays of biopsies or autopsies to diagnose abnormalities of expression or function (e.g., Southern or Northern blot analysis, in situ hybridization assays).

[0067] In addition, the expression of a polypeptide during embryonic development may also be determined using nucleic acid encoding the polypeptide. As addressed, infra, production of functionally impaired polypeptide can be the cause of various disease states, such as breast cancer. In situ hybridizations using polynucleotide probes may be employed to predict problems related to breast cancer. Further, as indicated, infra, administration of human active polypeptide, recombinantly produced as described herein, may be used to treat disease states related to functionally impaired polypeptide. Alternatively, gene therapy approaches may be employed to remedy deficiencies of functional polypeptide or to replace or compete with dysfunctional polypeptide.

[0068] Expression Vectors, Host Cells, and Genetically Engineered Cells

[0069] Provided herein are nucleic acid vectors, often expression vectors, which contain a DLG1, KIAA0783, DPF3 or CENPC1 nucleic acid. As used herein, the term “vector” refers to a nucleic acid molecule capable of transporting another nucleic acid to which it has been linked and can include a plasmid, cosmid, or viral vector. The vector can be capable of autonomous replication or it can integrate into a host DNA. Viral vectors may include replication defective retroviruses, adenoviruses and adeno-associated viruses for example.

[0070] A vector can include a DLG1, KIAA0783, DPF3 or CENPC1 nucleic acid in a form suitable for expression of the nucleic acid in a host cell. The recombinant expression vector typically includes one or more regulatory sequences operatively linked to the nucleic acid sequence to be expressed. The term “regulatory sequence” includes promoters, enhancers and other expression control elements (e.g., polyadenylation signals). Regulatory sequences include those that direct constitutive expression of a nucleotide sequence, as well as tissue-specific regulatory and/or inducible sequences. The design of the expression vector can depend on such factors as the choice of the host cell to be transformed, the level of expression of polypeptide desired, and the like. Expression vectors can be introduced into host cells to produce DLG1, KIAA0783, DPF3 or CENPC1 polypeptides, including fusion polypeptides, encoded by DLG1, KIAA0783, DPF3 or CENPC1 nucleic acids.

[0071] Recombinant expression vectors can be designed for expression of DLG1, KIAA0783, DPF3 or CENPC1 polypeptides in prokaryotic or eukaryotic cells. For example, DLG1, KIAA0783, DPF3 or CENPC1 polypeptides can be expressed in E. coli, insect cells (e.g., using baculovirus expression vectors), yeast cells, or mammalian cells. Suitable host cells are discussed further in Goeddel, Gene Expression Technology: Methods in Enzymology 185, Academic Press, San Diego, Calif. (1990). Alternatively, the recombinant expression vector can be transcribed and translated in vitro, for example using T7 promoter regulatory sequences and T7 polymerase.

[0072] Expression of polypeptides in prokaryotes is most often carried out in E. coli with vectors containing constitutive or inducible promoters directing the expression of either fusion or non-fusion polypeptides. Fusion vectors add a number of amino acids to a polypeptide encoded therein, usually to the amino terminus of the recombinant polypeptide. Such fusion vectors typically serve three purposes: 1) to increase expression of recombinant polypeptide; 2) to increase the solubility of the recombinant polypeptide; and 3) to aid in the purification of the recombinant polypeptide by acting as a ligand in affinity purification. Often, a proteolytic cleavage site is introduced at the junction of the fusion moiety and the recombinant polypeptide to enable separation of the recombinant polypeptide from the fusion moiety subsequent to purification of the fusion polypeptide. Such enzymes, and their cognate recognition sequences, include Factor Xa, thrombin and enterokinase. Typical fusion expression vectors include pGEX (Pharmacia Biotech Inc; Smith & Johnson, Gene 67: 31-40 (1988)), pMAL (New England Biolabs, Beverly, Mass.) and pRIT5 (Pharmacia, Piscataway, N.J.) which fuse glutathione S-transferase (GST), maltose E binding polypeptide, or polypeptide A, respectively, to the target recombinant polypeptide.

[0073] Purified fusion polypeptides can be used in screening assays and to generate antibodies specific for DLG1, KIAA0783, DPF3 or CENPC1 polypeptides. In a therapeutic embodiment, fusion polypeptide expressed in a retroviral expression vector is used to infect bone marrow cells that are subsequently transplanted into irradiated recipients. The pathology of the subject recipient is then examined after sufficient time has passed (e.g., six (6) weeks).

[0074] Expressing the polypeptide in host bacteria with an impaired capacity to proteolytically cleave the recombinant polypeptide is often used to maximize recombinant polypeptide expression (Gottesman, S., Gene Expression Technology: Methods in Enzymology, Academic Press, San Diego, Calif. 185: 119-128 (1990)). Another strategy is to alter the nucleotide sequence of the nucleic acid to be inserted into an expression vector so that the individual codons for each amino acid are those preferentially utilized in E. coli (Wada et al., Nucleic Acids Res. 20: 2111-2118 (1992)). Such alteration of nucleotide sequences can be carried out by standard DNA synthesis techniques.

[0075] When used in mammalian cells, the expression vector's control functions are often provided by viral regulatory elements. For example, commonly used promoters are derived from polyoma, Adenovirus 2, cytomegalovirus and Simian Virus 40. Recombinant mammalian expression vectors are often capable of directing expression of the nucleic acid in a particular cell type (e.g., tissue-specific regulatory elements are used to express the nucleic acid). Non-limiting examples of suitable tissue-specific promoters include an albumin promoter (liver-specific; Pinkert et al., Genes Dev. 1: 268-277 (1987)), lymphoid-specific promoters (Calame & Eaton, Adv. Immunol. 43: 235-275 (1988)), promoters of T cell receptors (Winoto & Baltimore, EMBO J. 8: 729-733 (1989)) promoters of immunoglobulins (Banerji et al., Cell 33: 729-740 (1983); Queen & Baltimore, Cell 33: 741-748 (1983)), neuron-specific promoters (e.g., the neurofilament promoter; Byrne & Ruddle, Proc. Natl. Acad. Sci. USA 86: 5473-5477 (1989)), pancreas-specific promoters (Edlund et al., Science 230: 912-916 (1985)), and mammary gland-specific promoters (e.g., milk whey promoter; U.S. Pat. No. 4,873,316 and European Application Publication No. 264,166). Developmentally-regulated promoters are sometimes utilized, for example, the murine hox promoters (Kessel & Gruss, Science 249: 374-379 (1990)) and the α-fetopolypeptide promoter (Campes & Tilghman, Genes Dev. 3: 537-546 (1989)).

[0076] A DLG1, KIAA0783, DPF3 or CENPC1 nucleic acid may also be cloned into an expression vector in an antisense orientation. Regulatory sequences (e.g., viral promoters and/or enhancers) operatively linked to a DLG1, KIAA0783, DPF3 or CENPC1 nucleic acid cloned in the antisense orientation can be chosen for directing constitutive, tissue specific or cell type specific expression of antisense RNA in a variety of cell types. Antisense expression vectors can be in the form of a recombinant plasmid, phagemid or attenuated virus. For a discussion of the regulation of gene expression using antisense genes see Weintraub et al., Antisense RNA as a molecular tool for genetic analysis, Reviews—Trends in Genetics, Vol. 1(1) (1986).

[0077] Also provided herein are host cells that include a DLG1, KIAA0783, DPF3 or CENPC1 nucleic acid within a recombinant expression vector or DLG1, KIAA0783, DPF3 or CENPC1 nucleic acid sequence fragments which allow it to homologously recombine into a specific site of the host cell genome. The terms “host cell” and “recombinant host cell” are used interchangeably herein. Such terms refer not only to the particular subject cell but rather also to the progeny or potential progeny of such a cell. Because certain modifications may occur in succeeding generations due to either mutation or environmental influences, such progeny may not, in fact, be identical to the parent cell, but are still included within the scope of the term as used herein. A host cell can be any prokaryotic or eukaryotic cell. For example, a DLG1, KIAA0783, DPF3 or CENPC1 polypeptide can be expressed in bacterial cells such as E. coli, insect cells, yeast or mammalian cells (such as Chinese hamster ovary cells (CHO) or COS cells). Other suitable host cells are known to those skilled in the art.

[0078] Vectors can be introduced into host cells via conventional transformation or transfection techniques. As used herein, the terms “transformation” and “transfection” are intended to refer to a variety of art-recognized techniques for introducing foreign nucleic acid (e.g., DNA) into a host cell, including calcium phosphate or calcium chloride co-precipitation, transduction/infection, DEAE-dextran-mediated transfection, lipofection, or electroporation.

[0079] A host cell provided herein can be used to produce (i.e., express) a DLG1, KIAA0783, DPF3 or CENPC1 polypeptide. Accordingly, further provided are methods for producing a DLG1, KIAA0783, DPF3 or CENPC1 polypeptide using the host cells described herein. In one embodiment, the method includes culturing host cells into which a recombinant expression vector encoding a DLG1, KIAA0783, DPF3 or CENPC1 polypeptide has been introduced in a suitable medium such that a DLG1, KIAA0783, DPF3 or CENPC1 polypeptide is produced. In another embodiment, the method further includes isolating a DLG1, KIAA0783, DPF3 or CENPC1 polypeptide from the medium or the host cell.

[0080] Also provided are cells or purified preparations of cells which include a DLG1, KIAA0783, DPF3 or CENPC1 transgene, or which otherwise misexpress DLG1, KIAA0783, DPF3 or CENPC1 polypeptide. Cell preparations can consist of human or non-human cells, e.g., rodent cells, e.g., mouse or rat cells, rabbit cells, or pig cells. In certain embodiments, the cell or cells include a DLG1, KIAA0783, DPF3 or CENPC1 transgene (e.g., a heterologous form of a DLG1, KIAA0783, DPF3 or CENPC1 such as a human gene expressed in non-human cells). The DLG1, KIAA0783, DPF3 or CENPC1 transgene can be misexpressed, e.g., overexpressed or underexpressed. In other embodiments, the cell or cells include a gene which misexpress an endogenous DLG1, KIAA0783, DPF3 or CENPC1 polypeptide (e.g., expression of a gene is disrupted, also known as a knockout). Such cells can serve as a model for studying disorders which are related to mutated or mis-expressed DLG1, KIAA0783, DPF3 or CENPC1 alleles or for use in drug screening. Also provided are human cells (e.g., a hematopoietic stem cells) transformed with a DLG1, KIAA0783, DPF3 or CENPC1 nucleic acid.

[0081] Also provided are cells or a purified preparation thereof (e.g., human cells) in which an endogenous DLG1, KIAA0783, DPF3 or CENPC1 nucleic acid is under the control of a regulatory sequence that does not normally control the expression of the endogenous DLG1, KIAA0783, DPF3 or CENPC1 gene. The expression characteristics of an endogenous gene within a cell (e.g., a cell line or microorganism) can be modified by inserting a heterologous DNA regulatory element into the genome of the cell such that the inserted regulatory element is operably linked to the endogenous DLG1, KIAA0783, DPF3 or CENPC1 gene. For example, an endogenous DLG1, KIAA0783, DPF3 or CENPC1 gene (e.g., a gene which is “transcriptionally silent,” not normally expressed, or expressed only at very low levels) may be activated by inserting a regulatory element which is capable of promoting the expression of a normally expressed gene product in that cell. Techniques such as targeted homologous recombinations, can be used to insert the heterologous DNA as described in, e.g., Chappel, U.S. Pat. No. 5,272,071; WO 91/06667, published on May 16, 1991.

[0082] Transgenic Animals

[0083] Non-human transgenic animals that express a heterologous DLG1, KIAA0783, DPF3 or CENPC1 polypeptide (e.g., expressed from a DLG1, KIAA0783, DPF3 or CENPC1 nucleic acid isolated from another organism) can be generated. Such animals are useful for studying the function and/or activity of a DLG1, KIAA0783, DPF3 or CENPC1 polypeptide and for identifying and/or evaluating modulators of DLG1, KIAA0783, DPF3 or CENPC1 nucleic acid and DLG1, KIAA0783, DPF3 or CENPC1 polypeptide activity. As used herein, a “transgenic animal” is a non-human animal such as a mammal (e.g., a non-human primate such as chimpanzee, baboon, or macaque; an ungulate such as an equine, bovine, or caprine; or a rodent such as a rat, a mouse, or an Israeli sand rat), a bird (e.g., a chicken or a turkey), an amphibian (e.g., a frog, salamander, or newt), or an insect (e.g., Drosophila melanogaster), in which one or more of the cells of the animal includes a DLG1, KIAA0783, DPF3 or CENPC1 transgene. A transgene is exogenous DNA or a rearrangement (e.g., a deletion of endogenous chromosomal DNA) that is often integrated into or occurs in the genome of cells in a transgenic animal. A transgene can direct expression of an encoded gene product in one or more cell types or tissues of the transgenic animal, and other transgenes can reduce expression (e.g., a knockout). Thus, a transgenic animal can be one in which an endogenous DLG1, KIAA0783, DPF3 or CENPC1 gene has been altered by homologous recombination between the endogenous gene and an exogenous DNA molecule introduced into a cell of the animal (e.g., an embryonic cell of the animal) prior to development of the animal.

[0084] Intronic sequences and polyadenylation signals can also be included in the transgene to increase expression efficiency of the transgene. One or more tissue-specific regulatory sequences can be operably linked to a DLG1, KIAA0783, DPF3 or CENPC1 transgene to direct expression of a DLG1, KIAA0783, DPF3 or CENPC1 polypeptide to particular cells. A transgenic founder animal can be identified based upon the presence of a DLG1, KIAA0783, DPF3 or CENPC1 transgene in its genome and/or expression of DLG1, KIAA0783, DPF3 or CENPC1 mRNA in tissues or cells of the animals. A transgenic founder animal can then be used to breed additional animals carrying the transgene. Moreover, transgenic animals carrying a transgene encoding a DLG1, KIAA0783, DPF3 or CENPC1 polypeptide can further be bred to other transgenic animals carrying other transgenes.

[0085] DLG1, KIAA0783, DPF3 or CENPC1 polypeptides can be expressed in transgenic animals or plants by introducing, for example, a nucleic acid encoding the polypeptide into the genome of an animal. In certain embodiments the nucleic acid is placed under the control of a tissue specific promoter, e.g., a milk or egg specific promoter, and recovered from the milk or eggs produced by the animal. Also included is a population of cells from a transgenic animal.

[0086] DLG1, KIAA0783, DPF3 and CENPC1 Polypeptides

[0087] Featured herein are isolated DLG1, KIAA0783, DPF3 or CENPC1 polypeptides, which include polypeptides having amino acid sequences set forth in SEQ ID NO: 9-12, and substantially identical polypeptides thereof. Such polypeptides sometimes are proteins or peptides. A DLG1, KIAA0783, DPF3 or CENPC1 polypeptide is a polypeptide encoded by a DLG1, KIAA0783, DPF3 or CENPC1 nucleic acid, where one nucleic acid can encode one or more different polypeptides. An “isolated” or “purified” polypeptide or protein is substantially free of cellular material or other contaminating proteins from the cell or tissue source from which the protein is derived, or substantially free from chemical precursors or other chemicals when chemically synthesized. In one embodiment, the language “substantially free” means preparation of a DLG1, KIAA0783, DPF3 or CENPC1 polypeptide or DLG1, KIAA0783, DPF3 or CENPC1 polypeptide variant having less than about 30%, 20%, 10% and sometimes 5% (by dry weight), of non-DLG1, KIAA0783, DPF3 or CENPC1 polypeptide (also referred to herein as a “contaminating protein”), or of chemical precursors or non-DLG1, KIAA0783, DPF3 or CENPC1 chemicals. When the DLG1, KIAA0783, DPF3 or CENPC1 polypeptide or a biologically active portion thereof is recombinantly produced, it is also often substantially free of culture medium, specifically, where culture medium represents less than about 20%, sometimes less than about 10%, and often less than about 5% of the volume of the polypeptide preparation. Isolated or purified DLG1, KIAA0783, DPF3 or CENPC1 polypeptide preparations are sometimes 0.01 milligrams or more or 0.1 milligrams or more, and often 1.0 milligrams or more and 10 milligrams or more in dry weight. In specific embodiments, a DLG1, KIAA0783, DPF3 or CENPC1 polypeptide comprises a glutamine at amino acid position 278 in SEQ ID NO: 9 or a glycine at amino acid position 389 in SEQ ID NO: 12.

[0088] In another aspect, featured herein are DLG1, KIAA0783, DPF3 or CENPC1 polypeptides and biologically active or antigenic fragments thereof that are useful as reagents or targets in assays applicable to prevention, treatment or diagnosis of breast cancer. In another embodiment, provided herein are DLG1, KIAA0783, DPF3 or CENPC1 polypeptides having a DLG1, KIAA0783, DPF3 or CENPC1 activity or activities.

[0089] Further included herein are DLG1, KIAA0783, DPF3 or CENPC1 polypeptide fragments. The polypeptide fragment may be a domain or part of a domain of a DLG1, KIAA0783, DPF3 or CENPC1 polypeptide. The polypeptide fragment is often 50 or fewer, 100 or fewer, or 200 or fewer amino acids in length, and is sometimes 300, 400, 500, 600, 700, or 900 or fewer amino acids in length. In certain embodiments, the polypeptide fragment comprises, consists essentially of, or consists of, at least 6 consecutive amino acids and not more than 1211 consecutive amino acids of SEQ ID NO: 9-12, or the polypeptide fragment comprises, consists essentially of, or consists of, at least 6 consecutive amino acids and not more than 543 consecutive amino acids of SEQ ID NO: 9-12.

[0090] DLG1, KIAA0783, DPF3 or CENPC1 polypeptides described herein can be used as immunogens to produce anti-DLG1, KIAA0783, DPF3 or CENPC1 antibodies in a subject, to purify DLG1, KIAA0783, DPF3 or CENPC1 ligands or binding partners, and in screening assays to identify molecules which inhibit or enhance the interaction of DLG1, KIAA0783, DPF3 or CENPC1 with a DLG1, KIAA0783, DPF3 or CENPC1 substrate. Full-length DLG1, KIAA0783, DPF3 or CENPC1 polypeptides and polynucleotides encoding the same may be specifically substituted for a DLG1, KIAA0783, DPF3 or CENPC1 polypeptide fragment or polynucleotide encoding the same in any embodiment described herein.

[0091] Substantially identical polypeptides may depart from the amino acid sequences set forth in SEQ ID NO: 9-12 in different manners. For example, conservative amino acid modifications may be introduced at one or more positions in the amino acid sequences of SEQ ID NO: 9-12. A “conservative amino acid substitution” is one in which the amino acid is replaced by another amino acid having a similar structure and/or chemical function. Families of amino acid residues having similar structures and functions are well known. These families include amino acids with basic side chains (e.g., lysine, arginine, histidine), acidic side chains (e.g., aspartic acid, glutamic acid), uncharged polar side chains (e.g., glycine, asparagine, glutamine, serine, threonine, tyrosine, cysteine), nonpolar side chains (e.g., alanine, valine, leucine, isoleucine, proline, phenylalanine, methionine, tryptophan), beta-branched side chains (e.g., threonine, valine, isoleucine) and aromatic side chains (e.g., tyrosine, phenylalanine, tryptophan, histidine). Also, essential and non-essential amino acids may be replaced. A “non-essential” amino acid is one that can be altered without abolishing or substantially altering the biological function of a DLG1, KIAA0783, DPF3 or CENPC1 polypeptide, whereas altering an “essential” amino acid abolishes or substantially alters the biological function of a DLG1, KIAA0783, DPF3 or CENPC1 polypeptide. Amino acids that are conserved among DLG1, KIAA0783, DPF3 or CENPC1 polypeptides are typically essential amino acids.

[0092] Also, DLG1, KIAA0783, DPF3 or CENPC1 polypeptides and polypeptide variants may exist as chimeric or fusion polypeptides. As used herein, a DLG1, KIAA0783, DPF3 or CENPC1 “chimeric polypeptide” or “fusion polypeptide” includes a DLG1, KIAA0783, DPF3 or CENPC1 polypeptide linked to a non-DLG1, KIAA0783, DPF3 or CENPC1 polypeptide. A “non-DLG1, KIAA0783, DPF3 or CENPC1 polypeptide” refers to a polypeptide having an amino acid sequence corresponding to a polypeptide which is not substantially identical to the DLG1, KIAA0783, DPF3 or CENPC1 polypeptide, which includes, for example, a polypeptide that is different from the DLG1, KIAA0783, DPF3 or CENPC1 polypeptide and derived from the same or a different organism. The DLG1, KIAA0783, DPF3 or CENPC1 polypeptide in the fusion polypeptide can correspond to an entire or nearly entire DLG1, KIAA0783, DPF3 or CENPC1 polypeptide or a fragment thereof. The non-DLG1, KIAA0783, DPF3 or CENPC1 polypeptide can be fused to the N-terminus or C-terminus of the DLG1, KIAA0783, DPF3 or CENPC1 polypeptide.

[0093] Fusion polypeptides can include a moiety having high affinity for a ligand. For example, the fusion polypeptide can be a GST-DLG1, KIAA0783, DPF3 or CENPC1 fusion polypeptide in which the DLG1, KIAA0783, DPF3 or CENPC1 sequences are fused to the C-terminus of the GST sequences, or a polyhistidine-DLG1, KIAA0783, DPF3 or CENPC1 fusion polypeptide in which the DLG1, KIAA0783, DPF3 or CENPC1 polypeptide is fused at the N- or C-terminus to a string of histidine residues. Such fusion polypeptides can facilitate purification of recombinant DLG1, KIAA0783, DPF3 or CENPC1. Expression vectors are commercially available that already encode a fusion moiety (e.g., a GST polypeptide), and a DLG1, KIAA0783, DPF3 or CENPC1 nucleic acid can be cloned into an expression vector such that the fusion moiety is linked in-frame to the DLG1, KIAA0783, DPF3 or CENPC1 polypeptide. Further, the fusion polypeptide can be a DLG1, KIAA0783, DPF3 or CENPC1 polypeptide containing a heterologous signal sequence at its N-terminus. In certain host cells (e.g., mammalian host cells), expression, secretion, cellular internalization, and cellular localization of a DLG1, KIAA0783, DPF3 or CENPC1 polypeptide can be increased through use of a heterologous signal sequence. Fusion polypeptides can also include all or a part of a serum polypeptide (e.g., an IgG constant region or human serum albumin).

[0094] DLG1, KIAA0783, DPF3 or CENPC1 polypeptides or fragments thereof can be incorporated into pharmaceutical compositions and administered to a subject in vivo. Administration of these DLG1, KIAA0783, DPF3 or CENPC1 polypeptides can be used to affect the bioavailability of a DLG1, KIAA0783, DPF3 or CENPC1 substrate and may effectively increase or decrease DLG1, KIAA0783, DPF3 or CENPC1 biological activity in a cell or effectively supplement dysfunctional or hyperactive DLG1, KIAA0783, DPF3 or CENPC1 polypeptide. DLG1, KIAA0783, DPF3 or CENPC1 fusion polypeptides may be useful therapeutically for the treatment of disorders caused by, for example, (i) aberrant modification or mutation of a gene encoding a DLG1, KIAA0783, DPF3 or CENPC1 polypeptide; (ii) mis-regulation of the DLG1, KIAA0783, DPF3 or CENPC1 gene; and (iii) aberrant post-translational modification of a DLG1, KIAA0783, DPF3 or CENPC1 polypeptide. Also, DLG1, KIAA0783, DPF3 or CENPC1 polypeptides can be used as immunogens to produce anti-DLG1, KIAA0783, DPF3 or CENPC1 antibodies in a subject, to purify DLG1, KIAA0783, DPF3 or CENPC1 ligands or binding partners, and in screening assays to identify molecules which inhibit or enhance the interaction of DLG1, KIAA0783, DPF3 or CENPC1 with a DLG1, KIAA0783, DPF3 or CENPC1 substrate. Preferably, said DLG1, KIAA0783, DPF3 or CENPC1 polypeptides are used in screening assays to identify molecules which inhibit the interaction of DLG1, KIAA0783, DPF3 or CENPC1.

[0095] In addition, polypeptides can be chemically synthesized using techniques known in the art (See, e.g., Creighton, 1983 Proteins. New York, N.Y.: W. H. Freeman and Company; and Hunkapiller et al., (1984) Nature July 12-18; 310(5973):105-11). For example, a relative short polypeptide fragment can be synthesized by use of a peptide synthesizer. Furthermore, if desired, non-classical amino acids or chemical amino acid analogs can be introduced as a substitution or addition into the fragment sequence. Non-classical amino acids include, but are not limited to, to the D-isomers of the common amino acids, 2,4-diaminobutyric acid, a-amino isobutyric acid, 4-aminobutyric acid, Abu, 2-amino butyric acid, g-Abu, e-Ahx, 6-amino hexanoic acid, Aib, 2-amino isobutyric acid, 3-amino propionic acid, ornithine, norleucine, norvaline, hydroxyproline, sarcosine, citrulline, homocitrulline, cysteic acid, t-butylglycine, t-butylalanine, phenylglycine, cyclohexylalanine, b-alanine, fluoroamino acids, designer amino acids such as b-methyl amino acids, Ca-methyl amino acids, Na-methyl amino acids, and amino acid analogs in general. Furthermore, the amino acid can be D (dextrorotary) or L (levorotary).

[0096] Also included are polypeptide fragments which are differentially modified during or after translation, e.g., by glycosylation, acetylation, phosphorylation, amidation, derivatization by known protecting/blocking groups, proteolytic cleavage, linkage to an antibody molecule or other cellular ligand, and the like. Any of numerous chemical modifications may be carried out by known techniques, including but not limited, to specific chemical cleavage by cyanogen bromide, trypsin, chymotrypsin, papain, V8 protease, NaBH₄; acetylation, formylation, oxidation, reduction; metabolic synthesis in the presence of tunicamycin; and the like.

[0097] Additional post-translational modifications include, for example, N-linked or O-linked carbohydrate chains, processing of N-terminal or C-terminal ends), attachment of chemical moieties to the amino acid backbone, chemical modifications of N-linked or O-linked carbohydrate chains, and addition or deletion of an N-terminal methionine residue as a result of prokaryotic host cell expression. The polypeptide fragments may also be modified with a detectable label, such as an enzymatic, fluorescent, isotopic or affinity label to allow for detection and isolation of the polypeptide.

[0098] Also provided are chemically modified polypeptide derivatives that may provide additional advantages such as increased solubility, stability and circulating time of the polypeptide, or decreased immunogenicity. See U.S. Pat. No. 4,179,337. The chemical moieties for derivitization may be selected from water soluble polymers such as polyethylene glycol, ethylene glycol/propylene glycol copolymers, carboxymethylcellulose, dextran, polyvinyl alcohol and the like. The polypeptides may be modified at random positions within the molecule, or at predetermined positions within the molecule and may include one, two, three or more attached chemical moieties.

[0099] The polymer may be of any molecular weight, and may be branched or unbranched. For polyethylene glycol, the molecular weight is between about 1 kDa and about 100 kDa (the term “about” indicating that in preparations of polyethylene glycol, some molecules will weigh more, some less, than the stated molecular weight) for ease in handling and manufacturing. Other sizes may be used, depending on the desired therapeutic profile (e.g., the duration of sustained release desired, the effects, if any on biological activity, the ease in handling, the degree or lack of antigenicity and other known effects of the polyethylene glycol to a therapeutic protein or analog).

[0100] The polyethylene glycol molecules (or other chemical moieties) should be attached to the polypeptide with consideration of effects on functional or antigenic domains of the polypeptide. There are a number of attachment methods available to those skilled in the art, e.g., EP 0 401 384, herein incorporated by reference (coupling PEG to G-CSF), see also Malik et al. (1992) Exp Hematol. September; 20(8):1028-35, reporting pegylation of GM-CSF using tresyl chloride). For example, polyethylene glycol may be covalently bound through amino acid residues via a reactive group, such as, a free amino or carboxyl group. Reactive groups are those to which an activated polyethylene glycol molecule may be bound. The amino acid residues having a free amino group may include lysine residues and the N-terminal amino acid residues; those having a free carboxyl group may include aspartic acid residues, glutamic acid residues and the C-terminal amino acid residue. Sulfhydryl groups may also be used as a reactive group for attaching the polyethylene glycol molecules. A polymer sometimes is attached at an amino group, such as attachment at the N-terminus or lysine group.

[0101] One may specifically desire proteins chemically modified at the N-terminus. Using polyethylene glycol as an illustration of the present composition, one may select from a variety of polyethylene glycol molecules (by molecular weight, branching, and the like), the proportion of polyethylene glycol molecules to protein (polypeptide) molecules in the reaction mix, the type of pegylation reaction to be performed, and the method of obtaining the selected N-terminally pegylated protein. The method of obtaining the N-terminally pegylated preparation (i.e., separating this moiety from other monopegylated moieties if necessary) may be by purification of the N-terminally pegylated material from a population of pegylated protein molecules. Selective proteins chemically modified at the N-terminus may be accomplished by reductive alkylation, which exploits differential reactivity of different types of primary amino groups (lysine versus the N-terminal) available for derivatization in a particular protein. Under the appropriate reaction conditions, substantially selective derivatization of the protein at the N-terminus with a carbonyl group containing polymer is achieved.

[0102] Substantially Identical Nucleic Acids and Polypeptides

[0103] Nucleotide sequences and polypeptide sequences that are substantially identical to a DLG1, KIAA0783, DPF3 or CENPC1 nucleotide sequence and the DLG1, KIAA0783, DPF3 or CENPC1 polypeptide sequences encoded by those nucleotide sequences are included herein. The term “substantially identical” as used herein refers to two or more nucleic acids or polypeptides sharing one or more identical nucleotide sequences or polypeptide sequences, respectively. Included are nucleotide sequences or polypeptide sequences that are 55% or more, 60% or more, 65% or more, 70% or more, 75% or more, 80% or more, 85% or more, 90% or more, 95% or more (each often within a 1%, 2%, 3% or 4% variability) or more identical to the nucleotide sequences in SEQ ID NO: 1-8 or the encoded DLG1, KIAA0783, DPF3 or CENPC1 polypeptide amino acid sequences. One test for determining whether two nucleic acids are substantially identical is to determine the percent of identical nucleotide sequences or polypeptide sequences shared between the nucleic acids or polypeptides.

[0104] Calculations of sequence identity are often performed as follows. Sequences are aligned for optimal comparison purposes (e.g., gaps can be introduced in one or both of a first and a second amino acid or nucleic acid sequence for optimal alignment and non-homologous sequences can be disregarded for comparison purposes). The length of a reference sequence aligned for comparison purposes is sometimes 30% or more, 40% or more, 50% or more, often 60% or more, and more often 70% or more, 80% or more, 90% or more, 90% or more, or 100% of the length of the reference sequence. The nucleotides or amino acids at corresponding nucleotide or polypeptide positions, respectively, are then compared among the two sequences. When a position in the first sequence is occupied by the same nucleotide or amino acid as the corresponding position in the second sequence, the nucleotides or amino acids are deemed to be identical at that position. The percent identity between the two sequences is a function of the number of identical positions shared by the sequences, taking into account the number of gaps, and the length of each gap, introduced for optimal alignment of the two sequences.

[0105] Comparison of sequences and determination of percent identity between two sequences can be accomplished using a mathematical algorithm. Percent identity between two amino acid or nucleotide sequences can be determined using the algorithm of Meyers & Miller, CABIOS 4: 11-17 (1989), which has been incorporated into the ALIGN program (version 2.0), using a PAM120 weight residue table, a gap length penalty of 12 and a gap penalty of 4. Also, percent identity between two amino acid sequences can be determined using the Needleman & Wunsch, J. Mol. Biol. 48: 444-453 (1970) algorithm which has been incorporated into the GAP program in the GCG software package (available at the http address www.gcg.com), using either a Blossum 62 matrix or a PAM250 matrix, and a gap weight of 16, 14, 12, 10, 8, 6, or 4 and a length weight of 1, 2, 3, 4, 5, or 6. Percent identity between two nucleotide sequences can be determined using the GAP program in the GCG software package (available at http address www.gcg.com), using a NWSgapdna.CMP matrix and a gap weight of 40, 50, 60, 70, or 80 and a length weight of 1, 2, 3, 4, 5, or 6. A set of parameters often used is a Blossum 62 scoring matrix with a gap open penalty of 12, a gap extend penalty of 4, and a frameshift gap penalty of 5.

[0106] Another manner for determining if two nucleic acids are substantially identical is to assess whether a polynucleotide homologous to one nucleic acid will hybridize to the other nucleic acid under stringent conditions. As use herein, the term “stringent conditions” refers to conditions for hybridization and washing. Stringent conditions are known to those skilled in the art and can be found in Current Protocols in Molecular Biology, John Wiley & Sons, N.Y., 6.3.1-6.3.6 (1989). Aqueous and non-aqueous methods are described in that reference and either can be used. An example of stringent hybridization conditions is hybridization in 6×sodium chloride/sodium citrate (SSC) at about 45° C., followed by one or more washes in 0.2×SSC, 0.1% SDS at 50° C. Another example of stringent hybridization conditions are hybridization in 6×sodium chloride/sodium citrate (SSC) at about 45° C., followed by one or more washes in 0.2×SSC, 0.1% SDS at 55° C. A further example of stringent hybridization conditions is hybridization in 6×sodium chloride/sodium citrate (SSC) at about 45° C., followed by one or more washes in 0.2×SSC, 0.1% SDS at 60° C. Often, stringent hybridization conditions are hybridization in 6×sodium chloride/sodium citrate (SSC) at about 45° C., followed by one or more washes in 0.2×SSC, 0.1% SDS at 65° C. More often, stringency conditions are 0.5M sodium phosphate, 7% SDS at 65° C., followed by one or more washes at 0.2×SSC, 1% SDS at 65° C.

[0107] An example of a substantially identical nucleotide sequence to a DLG1, KIAA0783, DPF3 or CENPC1 nucleotide sequence is one that has a different nucleotide sequence but still encodes the same polypeptide sequence encoded by the DLG1, KIAA0783, DPF3 or CENPC1 nucleotide sequence. Another example is a nucleotide sequence that encodes a polypeptide having a polypeptide sequence that is more than 70% or more identical to, sometimes 75% or more, 80% or more, or 85% or more identical to, and often 90% or more and 95% or more identical to a polypeptide sequence encoded by a DLG1, KIAA0783, DPF3 or CENPC1 nucleotide sequence.

[0108] DLG1, KIAA0783, DPF3 or CENPC1 nucleotide sequences and DLG1, KIAA0783, DPF3 or CENPC1 amino acid sequences can be used as “query sequences” to perform a search against public databases to identify other family members or related sequences, for example. Such searches can be performed using the NBLAST and XBLAST programs (version 2.0) of Altschul et al., J. Mol. Biol. 215: 403-10 (1990). BLAST nucleotide searches can be performed with the NBLAST program, score=100, wordlength=12 to obtain nucleotide sequences homologous to nucleotide sequences from SEQ ID NO: 1-8. BLAST polypeptide searches can be performed with the XBLAST program, score=50, wordlength=3 to obtain amino acid sequences homologous to polypeptides encoded by a DLG1, KIAA0783, DPF3 or CENPC1 nucleotide sequence. To obtain gapped alignments for comparison purposes, Gapped BLAST can be utilized as described in Altschul et al., Nucleic Acids Res. 25(17): 3389-3402 (1997). When utilizing BLAST and Gapped BLAST programs, default parameters of the respective programs (e.g., XBLAST and NBLAST) can be used (see the http address www.ncbi.nlm.nih.gov).

[0109] A nucleic acid that is substantially identical to a DLG1, KIAA0783, DPF3 or CENPC1 nucleotide sequence may include polymorphic sites at positions equivalent to those described herein when the sequences are aligned. For example, using the alignment procedures described herein, SNPs in a sequence substantially identical to a sequence in SEQ ID NO: 1-8 can be identified at nucleotide positions that match (i.e., align) with nucleotides at SNP positions in the nucleotide sequence of SEQ ID NO: 1-8. Also, where a polymorphic variation results in an insertion or deletion, insertion or deletion of a nucleotide sequence from a reference sequence can change the relative positions of other polymorphic sites in the nucleotide sequence.

[0110] Substantially identical nucleotide and polypeptide sequences include those that are naturally occurring, such as allelic variants (same locus), splice variants, homologs (different locus), and orthologs (different organism) or can be non-naturally occurring. Non-naturally occurring variants can be generated by mutagenesis techniques, including those applied to polynucleotides, cells, or organisms. The variants can contain nucleotide substitutions, deletions, inversions and insertions. Variation can occur in either or both the coding and non-coding regions. The variations can produce both conservative and non-conservative amino acid substitutions (as compared in the encoded product). Orthologs, homologs, allelic variants, and splice variants can be identified using methods known in the art. These variants normally comprise a nucleotide sequence encoding a polypeptide that is 50% or more, about 55% or more, often about 70-75% or more, more often about 80-85% or more, and typically about 90-95% or more identical to the amino acid sequences of target polypeptides or a fragment thereof. Such nucleic acid molecules readily can be identified as being able to hybridize under stringent conditions to a nucleotide sequence in SEQ ID NO: 1-8 or a fragment thereof. Nucleic acid molecules corresponding to orthologs, homologs, and allelic variants of a nucleotide sequence in SEQ ID NO: 1-8 can be identified by mapping the sequence to the same chromosome or locus as the nucleotide sequence in SEQ ID NO: 1-8.

[0111] Also, substantially identical nucleotide sequences may include codons that are altered with respect to the naturally occurring sequence for enhancing expression of a target polypeptide in a particular expression system. For example, the nucleic acid can be one in which one or more codons are altered, and often 10% or more or 20% or more of the codons are altered for optimized expression in bacteria (e.g., E. coli), yeast (e.g., S. cervesiae), human (e.g., 293 cells), insect, or rodent (e.g., hamster) cells.

[0112] Methods for Identifying Subjects at Risk of Breast Cancer and Breast Cancer Risk in a Subject

[0113] Methods for prognosing and diagnosing breast cancer in subjects are provided herein. These methods include detecting the presence or absence of one or more polymorphic variations associated with breast cancer in a nucleotide sequence set forth in SEQ ID NO: 1-4, or substantially identical sequence thereof, in a sample from a subject, where the presence of a polymorphic variant is indicative of a risk of breast cancer.

[0114] Thus, featured herein is a method for detecting a subject at risk of breast cancer or the risk of breast cancer in a subject, which comprises detecting the presence or absence of a polymorphic variation associated with breast cancer at a polymorphic site in a nucleotide sequence set forth in SEQ ID NO: 1-4 in a nucleic acid sample from a subject, where the nucleotide sequence comprises a polynucleotide sequence selected from the group consisting of: (a) a nucleotide sequence set forth in SEQ ID NO: 1-4; (b) a nucleotide sequence which encodes a polypeptide having an amino acid sequence encoded by a nucleotide sequence in SEQ ID NO: 1-4; (c) a nucleotide sequence which encodes a polypeptide that is 90% or more identical to an amino acid sequence encoded by a nucleotide sequence in SEQ ID NO: 1-4 or a nucleotide sequence about 90% or more identical to the nucleotide sequence set forth in SEQ ID NO: 1-4; and (d) a fragment of a nucleotide sequence of (a), (b), or (c), often a fragment that includes a polymorphic site associated with breast cancer; whereby the presence of the polymorphic variation is indicative of a risk of breast cancer in the subject. In certain embodiments, determining the presence of a combination of two or more polymorphic variants associated with breast cancer in one or more nucleotide sequences of the sample is determined to identify a subject at risk of breast cancer and/or risk of breast cancer.

[0115] A risk of developing aggressive forms of breast cancer likely to metastasize or invade surrounding tissues (e.g., Stage IIIA, IIIB, and IV breast cancers), and subjects at risk of developing aggressive forms of breast cancer also may be identified by the methods described herein. These methods include collecting phenotype information from subjects having breast cancer, which includes the stage of progression of the breast cancer, and performing a secondary phenotype analysis to detect the presence or absence of one or more polymorphic variations associated with a particular stage form of breast cancer. Thus, detecting the presence or absence of one or more polymorphic variations in a DLG1, KIAA0783, DPF3 or CENPC1 nucleotide sequence associated with a late stage form of breast cancer often is prognostic and/or diagnostic of an aggressive form of the cancer.

[0116] Results from prognostic tests may be combined with other test results to diagnose breast cancer. For example, prognostic results may be gathered, a patient sample may be ordered based on a determined predisposition to breast cancer, the patient sample is analyzed, and the results of the analysis may be utilized to diagnose breast cancer. Also breast cancer diagnostic methods can be developed from studies used to generate prognostic/diagnostic methods in which populations are stratified into subpopulations having different progressions of breast cancer. In another embodiment, prognostic results may be gathered; a patient's risk factors for developing breast cancer analyzed (e.g., age, race, family history, age of first menstrual cycle, age at birth of first child); and a patient sample may be ordered based on a determined predisposition to breast cancer. In an alternative embodiment, the results from predisposition analyses described herein may be combined with other test results indicative of breast cancer, which were previously, concurrently, or subsequently gathered with respect to the predisposition testing. In these embodiments, the combination of the prognostic test results with other test results can be probative of breast cancer, and the combination can be utilized as a breast cancer diagnostic. The results of any test indicative of breast cancer known in the art may be combined with the methods described herein. Examples of such tests are mammography (e.g., a more frequent and/or earlier mammography regimen may be prescribed); breast biopsy and optionally a biopsy from another tissue; breast ultrasound and optionally an ultrasound analysis of another tissue; breast magnetic resonance imaging (MRI) and optionally an MRI analysis of another tissue; electrical impedance (T-scan) analysis of breast and optionally of another tissue; ductal lavage; nuclear medicine analysis (e.g., scintimammography); BRCA1 and/or BRCA2 sequence analysis results; and thermal imaging of the breast and optionally of another tissue. Testing may be performed on tissue other than breast to diagnose the occurrence of metastasis (e.g., testing of the lymph node).

[0117] Risk of breast cancer sometimes is expressed as a probability, such as an odds ratio, percentage, or risk factor. The risk is based upon the presence or absence of one or more polymorphic variants described herein, and also may be based in part upon phenotypic traits of the individual being tested. Methods for calculating predispositions based upon patient data are well known (see, e.g., Agresti, Categorical Data Analysis, 2nd Ed. 2002. Wiley). Allelotyping and genotyping analyses may be carried out in populations other than those exemplified herein to enhance the predictive power of the prognostic method. These further analyses are executed in view of the exemplified procedures described herein, and may be based upon the same polymorphic variations or additional polymorphic variations. Risk determinations for breast cancer are useful in a variety of applications. In one embodiment, breast cancer risk determinations are used by clinicians to direct appropriate detection, preventative and treatment procedures to subjects who most require these. In another embodiment, breast cancer risk determinations are used by health insurers for preparing actuarial tables and for calculating insurance premiums.

[0118] The nucleic acid sample typically is isolated from a biological sample obtained from a subject. For example, nucleic acid can be isolated from blood, saliva, sputum, urine, cell scrapings, and biopsy tissue. The nucleic acid sample can be isolated from a biological sample using standard techniques, such as the technique described in Example 2. As used herein, the term “subject” refers primarily to humans but also refers to other mammals such as dogs, cats, and ungulates (e.g., cattle, sheep, and swine). Subjects also include avians (e.g., chickens and turkeys), reptiles, and fish (e.g., salmon), as embodiments described herein can be adapted to nucleic acid samples isolated from any of these organisms. The nucleic acid sample may be isolated from the subject and then directly utilized in a method for determining the presence of a polymorphic variant, or alternatively, the sample may be isolated and then stored (e.g., frozen) for a period of time before being subjected to analysis.

[0119] The presence or absence of a polymorphic variant is determined using one or both chromosomal complements represented in the nucleic acid sample. Determining the presence or absence of a polymorphic variant in both chromosomal complements represented in a nucleic acid sample from a subject having a copy of each chromosome is useful for determining the zygosity of an individual for the polymorphic variant (i.e., whether the individual is homozygous or heterozygous for the polymorphic variant). Any oligonucleotide-based diagnostic may be utilized to determine whether a sample includes the presence or absence of a polymorphic variant in a sample. For example, primer extension methods, ligase sequence determination methods (e.g., U.S. Pat. Nos. 5,679,524 and 5,952,174, and WO 01/27326), mismatch sequence determination methods (e.g., U.S. Pat. Nos. 5,851,770; 5,958,692; 6,110,684; and 6,183,958), microarray sequence determination methods, restriction fragment length polymorphism (RFLP), single strand conformation polymorphism detection (SSCP) (e.g., U.S. Pat. Nos. 5,891,625 and 6,013,499), PCR-based assays (e.g., TAQMAN® PCR System (Applied Biosystems)), and nucleotide sequencing methods may be used.

[0120] Oligonucleotide extension methods typically involve providing a pair of oligonucleotide primers in a polymerase chain reaction (PCR) or in other nucleic acid amplification methods for the purpose of amplifying a region from the nucleic acid sample that comprises the polymorphic variation. One oligonucleotide primer is complementary to a region 3′ of the polymorphism and the other is complementary to a region 5′ of the polymorphism. A PCR primer pair may be used in methods disclosed in U.S. Pat. Nos. 4,683,195; 4,683,202, 4,965,188; 5,656,493; 5,998,143; 6,140,054; WO 01/27327; and WO 01/27329 for example. PCR primer pairs may also be used in any commercially available machines that perform PCR, such as any of the GENEAMP® Systems available from Applied Biosystems. Also, those of ordinary skill in the art will be able to design oligonucleotide primers based upon a nucleotide sequence set forth in SEQ ID NO: 1-4 without undue experimentation using knowledge readily available in the art.

[0121] Also provided is an extension oligonucleotide that hybridizes to the amplified fragment adjacent to the polymorphic variation. As used herein, the term “adjacent” refers to the 3′ end of the extension oligonucleotide being often 1 nucleotide from the 5′ end of the polymorphic site, and sometimes 2, 3, 4, 5, 6, 7, 8, 9, or 10 nucleotides from the 5′ end of the polymorphic site, in the nucleic acid when the extension oligonucleotide is hybridized to the nucleic acid. The extension oligonucleotide then is extended by one or more nucleotides, and the number and/or type of nucleotides that are added to the extension oligonucleotide determine whether the polymorphic variant is present. Oligonucleotide extension methods are disclosed, for example, in U.S. Pat. Nos. 4,656,127; 4,851,331; 5,679,524; 5,834,189; 5,876,934; 5,908,755; 5,912,118; 5,976,802; 5,981,186; 6,004,744; 6,013,431; 6,017,702; 6,046,005; 6,087,095; 6,210,891; and WO 01/20039. Oligonucleotide extension methods using mass spectrometry are described, for example, in U.S. Pat. Nos. 5,547,835; 5,605,798; 5,691,141; 5,849,542; 5,869,242; 5,928,906; 6,043,031; and 6,194,144, and a method often utilized is described herein in Example 2. Multiple extension oligonucleotides may be utilized in one reaction, which is referred to herein as “multiplexing.”

[0122] A microarray can be utilized for determining whether a polymorphic variant is present or absent in a nucleic acid sample. A microarray may include any oligonucleotides described herein, and methods for making and using oligonucleotide microarrays suitable for diagnostic use are disclosed in U.S. Pat. Nos. 5,492,806; 5,525,464; 5,589,330; 5,695,940; 5,849,483; 6,018,041; 6,045,996; 6,136,541; 6,142,681; 6,156,501; 6,197,506; 6,223,127; 6,225,625; 6,229,911; 6,239,273; WO 00/52625; WO 01/25485; and WO 01/29259. The microarray typically comprises a solid support and the oligonucleotides may be linked to this solid support by covalent bonds or by non-covalent interactions. The oligonucleotides may also be linked to the solid support directly or by a spacer molecule. A microarray may comprise one or more oligonucleotides complementary to a polymorphic site set forth in SEQ ID NO: 1-4 or below.

[0123] A kit also may be utilized for determining whether a polymorphic variant is present or absent in a nucleic acid sample. A kit often comprises one or more pairs of oligonucleotide primers useful for amplifying a fragment of a DLG1, KIAA0783, DPF3 or CENPC1 nucleotide sequence or a substantially identical sequence thereof, where the fragment includes a polymorphic site. The kit sometimes comprises a polymerizing agent, for example, a thermostable nucleic acid polymerase such as one disclosed in U.S. Pat. Nos. 4,889,818 or 6,077,664. Also, the kit often comprises an elongation oligonucleotide that hybridizes to a DLG1, KIAA0783, DPF3 or CENPC1 nucleotide sequence in a nucleic acid sample adjacent to the polymorphic site. Where the kit includes an elongation oligonucleotide, it also often comprises chain elongating nucleotides, such as dATP, dTTP, dGTP, dCTP, and dITP, including analogs of dATP, dTTP, dGTP, dCTP and dITP, provided that such analogs are substrates for a thermostable nucleic acid polymerase and can be incorporated into a nucleic acid chain elongated from the extension oligonucleotide. Along with chain elongating nucleotides would be one or more chain terminating nucleotides such as ddATP, ddTTP, ddGTP, ddCTP, and the like. In an embodiment, the kit comprises one or more oligonucleotide primer pairs, a polymerizing agent, chain elongating nucleotides, at least one elongation oligonucleotide, and one or more chain terminating nucleotides. Kits optionally include buffers, vials, microtiter plates, and instructions for use.

[0124] An individual identified as being at risk of breast cancer may be heterozygous or homozygous with respect to the allele associated with a higher risk of breast cancer. A subject homozygous for an allele associated with an increased risk of breast cancer is at a comparatively high risk of breast cancer, a subject heterozygous for an allele associated with an increased risk of breast cancer is at a comparatively intermediate risk of breast cancer, and a subject homozygous for an allele associated with a decreased risk of breast cancer is at a comparatively low risk of breast cancer. A genotype may be assessed for a complementary strand, such that the complementary nucleotide at a particular position is detected.

[0125] Also featured are methods for determining risk of breast cancer and/or identifying a subject at risk of breast cancer by contacting a polypeptide or protein encoded by a DLG1, KIAA0783, DPF3 or CENPC1 nucleotide sequence from a subject with an antibody that specifically binds to an epitope associated with increased risk of breast cancer in the polypeptide. In certain embodiments, the antibody specifically binds to an epitope that comprises a glutamine at amino acid position 278 in SEQ ID NO: 9 or a glycine at amino acid position 389 in SEQ ID NO: 12.

[0126] Applications of Prognostic and Diagnostic Results to Pharmacogenomic Methods

[0127] Pharmacogenomics is a discipline that involves tailoring a treatment for a subject according to the subject's genotype. For example, based upon the outcome of a prognostic test described herein, a clinician or physician may target pertinent information and preventative or therapeutic treatments to a subject who would be benefited by the information or treatment and avoid directing such information and treatments to a subject who would not be benefited (e.g., the treatment has no therapeutic effect and/or the subject experiences adverse side effects). As therapeutic approaches for breast cancer continue to evolve and improve, the goal of treatments for breast cancer related disorders is to intervene even before clinical signs (e.g., identification of lump in the breast) first manifest. Thus, genetic markers associated with susceptibility to breast cancer prove useful for early diagnosis, prevention and treatment of breast cancer.

[0128] The following is an example of a pharmacogenomic embodiment. A particular treatment regimen can exert a differential effect depending upon the subject's genotype. Where a candidate therapeutic exhibits a significant interaction with a major allele and a comparatively weak interaction with a minor allele (e.g., an order of magnitude or greater difference in the interaction), such a therapeutic typically would not be administered to a subject genotyped as being homozygous for the minor allele, and sometimes not administered to a subject genotyped as being heterozygous for the minor allele. In another example, where a candidate therapeutic is not significantly toxic when administered to subjects who are homozygous for a major allele but is comparatively toxic when administered to subjects heterozygous or homozygous for a minor allele, the candidate therapeutic is not typically administered to subjects who are genotyped as being heterozygous or homozygous with respect to the minor allele.

[0129] The methods described herein are applicable to pharmacogenomic methods for detecting, preventing, alleviating and/or treating breast cancer. For example, a nucleic acid sample from an individual may be subjected to a genetic test described herein. Where one or more polymorphic variations associated with increased risk of breast cancer are identified in a subject, information for detecting, preventing or treating breast cancer and/or one or more breast cancer detection, prevention and/or treatment regimens then may be directed to and/or prescribed to that subject.

[0130] In certain embodiments, a detection, prevenative and/or treatment regimen is specifically prescribed and/or administered to individuals who will most benefit from it based upon their risk of developing breast cancer assessed by the methods described herein. Thus, provided are methods for identifying a subject at risk of breast cancer and then prescribing a detection, therapeutic or preventative regimen to individuals identified as being at risk of breast cancer. Thus, certain embodiments are directed to methods for treating breast cancer in a subject, reducing risk of breast cancer in a subject, or early detection of breast cancer in a subject, which comprise: detecting the presence or absence of a polymorphic variant associated with breast cancer in a nucleotide sequence in a nucleic acid sample from a subject, where the nucleotide sequence comprises a polynucleotide sequence selected from the group consisting of: (a) a nucleotide sequence set forth in SEQ ID NO: 1-4; (b) a nucleotide sequence which encodes a polypeptide having an amino acid sequence encoded by a nucleotide sequence in SEQ ID NO: 1-4; (c) a nucleotide sequence which encodes a polypeptide that is 90% or more identical to an amino acid sequence encoded by a nucleotide sequence in SEQ ID NO: 1-4 or a nucleotide sequence about 90% or more identical to the nucleotide sequence set forth in SEQ ID NO: 1-4; and (d) a fragment of a nucleotide sequence of (a), (b), or (c), sometimes comprising a polymorphic site associated with breast cancer; and prescribing or administering a breast cancer treatment regimen, preventative regimen and/or detection regimen to a subject from whom the sample originated where the presence of one or more polymorphic variations associated with breast cancer are detected in the nucleotide sequence. In these methods, genetic results may be utilized in combination with other test results to diagnose breast cancer as described above. Other test results include but are not limited to mammography results, imaging results, biopsy results and results from BRCA1 or BRAC2 test results, as described above.

[0131] Detection regimens include one or more mammography procedures, a regular mammography regimen (e.g., once a year, or once every six, four, three or two months); an early mammography regimen (e.g., mammography tests are performed beginning at age 25, 30, or 35); one or more biopsy procedures (e.g., a regular biopsy regimen beginning at age 40); breast biopsy and biopsy from other tissue; breast ultrasound and optionally ultrasound analysis of another tissue; breast magnetic resonance imaging (MRI) and optionally MRI analysis of another tissue; electrical impedance (T-scan) analysis of breast and optionally another tissue; ductal lavage; nuclear medicine analysis (e.g., scintimammography); BRCA1 and/or BRCA2 sequence analysis results; and/or thermal imaging of the breast and optionally another tissue.

[0132] Treatments sometimes are preventative (e.g., is prescribed or administered to reduce the probability that a breast cancer associated condition arises or progresses), sometimes are therapeutic, and sometimes delay, alleviate or halt the progression of breast cancer. Any known preventative or therapeutic treatment for alleviating or preventing the occurrence of breast cancer is prescribed and/or administered. For example, certain preventative treatments often are prescribed to subjects having a predisposition to breast cancer and where the subject is not diagnosed with breast cancer or is diagnosed as having symptoms indicative of early stage breast cancer (e.g., stage I). For subjects not diagnosed as having breast cancer, any preventative treatments known in the art can be prescribed and administered, which include selective hormone receptor modulators (e.g., selective estrogen receptor modulators (SERMs) such as tamoxifen, reloxifene, and toremifene); compositions that prevent production of hormones (e.g., aramotase inhibitors that prevent the production of estrogen in the adrenal gland, such as exemestane, letrozole, anastrozol, groserelin, and megestrol); other hormonal treatments (e.g., goserelin acetate and fulvestrant); biologic response modifiers such as antibodies (e.g., trastuzumab (herceptin/HER2)); surgery (e.g., lumpectomy and mastectomy); drugs that delay or halt metastasis (e.g., pamidronate disodium); and alternative/complementary medicine (e.g., acupuncture, acupressure, moxibustion, qi gong, reiki, ayurveda, vitamins, minerals, and herbs (e.g., astragalus root, burdock root, garlic, green tea, and licorice root)).

[0133] The use of breast cancer treatments are well known in the art, and include surgery, chemotherapy and/or radiation therapy. Any of the treatments may be used in combination to treat or prevent breast cancer (e.g., surgery followed by radiation therapy or chemotherapy). Examples of chemotherapy combinations used to treat breast cancer include: cyclophosphamide (Cytoxan), methotrexate (Amethopterin, Mexate, Folex), and fluorouracil (Fluorouracil, 5-Fu, Adrucil), which is referred to as CMF; cyclophosphamide, doxorubicin (Adriamycin), and fluorouracil, which is referred to as CAF; and doxorubicin (Adriamycin) and cyclophosphamide, which is referred to as AC.

[0134] As breast cancer preventative and treatment information can be specifically targeted to subjects in need thereof (e.g., those at risk of developing breast cancer or those that have early signs of breast cancer), provided herein is a method for preventing or reducing the risk of developing breast cancer in a subject, which comprises: (a) detecting the presence or absence of a polymorphic variation associated with breast cancer at a polymorphic site in a nucleotide sequence in a nucleic acid sample from a subject; (b) identifying a subject with a predisposition to breast cancer, whereby the presence of the polymorphic variation is indicative of a predisposition to breast cancer in the subject; and (c) if such a predisposition is identified, providing the subject with information about methods or products to prevent or reduce breast cancer or to delay the onset of breast cancer. Also provided is a method of targeting information or advertising to a subpopulation of a human population based on the subpopulation being genetically predisposed to a disease or condition, which comprises: (a) detecting the presence or absence of a polymorphic variation associated with breast cancer at a polymorphic site in a nucleotide sequence in a nucleic acid sample from a subject; (b) identifying the subpopulation of subjects in which the polymorphic variation is associated with breast cancer; and (c) providing information only to the subpopulation of subjects about a particular product which may be obtained and consumed or applied by the subject to help prevent or delay onset of the disease or condition.

[0135] Pharmacogenomics methods also may be used to analyze and predict a response to a breast cancer treatment or a drug. For example, if pharmacogenomics analysis indicates a likelihood that an individual will respond positively to a breast cancer treatment with a particular drug, the drug may be administered to the individual. Conversely, if the analysis indicates that an individual is likely to respond negatively to treatment with a particular drug, an alternative course of treatment may be prescribed. A negative response may be defined as either the absence of an efficacious response or the presence of toxic side effects. The response to a therapeutic treatment can be predicted in a background study in which subjects in any of the following populations are genotyped: a population that responds favorably to a treatment regimen, a population that does not respond significantly to a treatment regimen, and a population that responds adversely to a treatment regiment (e.g., exhibits one or more side effects). These populations are provided as examples and other populations and subpopulations may be analyzed. Based upon the results of these analyses, a subject is genotyped to predict whether he or she will respond favorably to a treatment regimen, not respond significantly to a treatment regimen, or respond adversely to a treatment regimen.

[0136] The methods described herein also are applicable to clinical drug trials. One or more polymorphic variants indicative of response to an agent for treating breast cancer or to side effects to an agent for treating breast cancer may be identified using the methods described herein. Thereafter, potential participants in clinical trials of such an agent may be screened to identify those individuals most likely to respond favorably to the drug and exclude those likely to experience side effects. In that way, the effectiveness of drug treatment may be measured in individuals who respond positively to the drug, without lowering the measurement as a result of the inclusion of individuals who are unlikely to respond positively in the study and without risking undesirable safety problems. In certain embodiments, the agent for treating breast cancer described herein targets DLG1, KIAA0783, DPF3 or CENPC1 or a target in the DLG1, KIAA0783, DPF3 or CENPC1 pathway.

[0137] Thus, another embodiment is a method of selecting an individual for inclusion in a clinical trial of a treatment or drug comprising the steps of: (a) obtaining a nucleic acid sample from an individual; (b) determining the identity of a polymorphic variation which is associated with a positive response to the treatment or the drug, or at least one polymorphic variation which is associated with a negative response to the treatment or the drug in the nucleic acid sample, and (c) including the individual in the clinical trial if the nucleic acid sample contains said polymorphic variation associated with a positive response to the treatment or the drug or if the nucleic acid sample lacks said polymorphic variation associated with a negative response to the treatment or the drug. In addition, the methods for selecting an individual for inclusion in a clinical trial of a treatment or drug encompass methods with any further limitation described in this disclosure, or those following, specified alone or in any combination. The polymorphic variation may be in a sequence selected individually or in any combination from the group consisting of (i) a polynucleotide sequence set forth in SEQ ID NO: 1-4; (ii) a polynucleotide sequence that is 90% or more identical to a nucleotide sequence set forth in SEQ ID NO: 1-4; (iii) a polynucleotide sequence that encodes a polypeptide having an amino acid sequence identical to or 90% or more identical to an amino acid sequence encoded by a nucleotide sequence set forth in SEQ ID NO: 1-4; and (iv) a fragment of a polynucleotide sequence of (i), (ii), or (iii) comprising the polymorphic site. The including step (c) optionally comprises administering the drug or the treatment to the individual if the nucleic acid sample contains the polymorphic variation associated with a positive response to the treatment or the drug and the nucleic acid sample lacks said biallelic marker associated with a negative response to the treatment or the drug.

[0138] Also provided herein is a method of partnering between a diagnostic/prognostic testing provider and a provider of a consumable product, which comprises: (a) the diagnostic/prognostic testing provider detects the presence or absence of a polymorphic variation associated with breast cancer at a polymorphic site in a nucleotide sequence in a nucleic acid sample from a subject; (b) the diagnostic/prognostic testing provider identifies the subpopulation of subjects in which the polymorphic variation is associated with breast cancer; (c) the diagnostic/prognostic testing provider forwards information to the subpopulation of subjects about a particular product which may be obtained and consumed or applied by the subject to help prevent or delay onset of the disease or condition; and (d) the provider of a consumable product forwards to the diagnostic test provider a fee every time the diagnostic/prognostic test provider forwards information to the subject as set forth in step (c) above.

[0139] Compositions Comprising Breast Cancer-Directed Molecules

[0140] Featured herein is a composition comprising a breast cancer cell and one or more molecules specifically directed and targeted to a nucleic acid comprising a DLG1, KIAA0783, DPF3 or CENPC1 nucleotide sequence or a DLG1, KIAA0783, DPF3 or CENPC1 polypeptide. Such directed molecules include, but are not limited to, a compound that binds to a DLG1, KIAA0783, DPF3 or CENPC1 nucleic acid or a DLG1, KIAA0783, DPF3 or CENPC1 polypeptide; a RNAi or siRNA molecule having a strand complementary to a DLG1, KIAA0783, DPF3 or CENPC1 nucleotide sequence; an antisense nucleic acid complementary to an RNA encoded by a DLG1, KIAA0783, DPF3 or CENPC1 DNA sequence; a ribozyme that hybridizes to a DLG1, KIAA0783, DPF3 or CENPC1 nucleotide sequence; a nucleic acid aptamer that specifically binds a DLG1, KIAA0783, DPF3 or CENPC1 polypeptide; and an antibody that specifically binds to a DLG1, KIAA0783, DPF3 or CENPC1 polypeptide or binds to a DLG1, KIAA0783, DPF3 or CENPC1 nucleic acid. In certain embodiments, the antibody specifically binds to an epitope that comprises a glutamine at amino acid position 278 in SEQ ID NO: 9 or a glycine at amino acid position 389 in SEQ ID NO: 12. In specific embodiments, the breast cancer directed molecule interacts with a DLG1, KIAA0783, DPF3 or CENPC1 nucleic acid or polypeptide variant associated with breast cancer. In other embodiments, the breast cancer directed molecule interacts with a polypeptide involved in the DLG1, KIAA0783, DPF3 or CENPC1 signal pathway, or a nucleic acid encoding such a polypeptide. Polypeptides involved in the DLG1, KIAA0783, DPF3 or CENPC1 signal pathway are discussed herein.

[0141] Compositions sometimes include an adjuvant known to stimulate an immune response, and in certain embodiments, an adjuvant that stimulates a T-cell lymphocyte response. Adjuvants are known, including but not limited to an aluminum adjuvant (e.g., aluminum hydroxide); a cytokine adjuvant or adjuvant that stimulates a cytokine response (e.g., interleukin (IL)-12 and/or γ-interferon cytokines); a Freund-type mineral oil adjuvant emulsion (e.g., Freund's complete or incomplete adjuvant); a synthetic lipoid compound; a copolymer adjuvant (e.g., TitreMax); a saponin; Quil A; a liposome; an oil-in-water emulsion (e.g., an emulsion stabilized by Tween 80 and pluronic polyoxyethlene/polyoxypropylene block copolymer (Syntex Adjuvant Formulation); TitreMax; detoxified endotoxin (MPL) and mycobacterial cell wall components (TDW, CWS) in 2% squalene (Ribi Adjuvant System)); a muramyl dipeptide; an immune-stimulating complex (ISCOM, e.g., an Ag-modified saponin/cholesterol micelle that forms stable cage-like structure); an aqueous phase adjuvant that does not have a depot effect (e.g., Gerbu adjuvant); a carbohydrate polymer (e.g., AdjuPrime); L-tyrosine; a manide-oleate compound (e.g., Montanide); an ethylene-vinyl acetate copolymer (e.g., Elvax 40W1,2); or lipid A, for example. Such compositions are useful for generating an immune response against a breast cancer directed molecule (e.g., an HLA-binding subsequence within a polypeptide encoded by a nucleotide sequence in SEQ ID NO: 1-4). In such methods, a peptide having an amino acid subsequence of a polypeptide encoded by a nucleotide sequence in SEQ ID NO: 1-4 is delivered to a subject, where the subsequence binds to an HLA molecule and induces a CTL lymphocyte response. The peptide sometimes is delivered to the subject as an isolated peptide or as a minigene in a plasmid that encodes the peptide. Methods for identifying HLA-binding subsequences in such polypeptides are known (see e.g., publication WO02/20616 and PCT application US98/01373 for methods of identifying such sequences).

[0142] The breast cancer cell may be in a group of breast cancer cells and/or other types of cells cultured in vitro or in a tissue having breast cancer cells (e.g., a melanocytic lesion) maintained in vitro or present in an animal in vivo (e.g., a rat, mouse, ape or human). In certain embodiments, a composition comprises a component from a breast cancer cell or from a subject having a breast cancer cell instead of the breast cancer cell or in addition to the breast cancer cell, where the component sometimes is a nucleic acid molecule (e.g., genomic DNA), a protein mixture or isolated protein, for example. The aforementioned compositions have utility in diagnostic, prognostic and pharmacogenomic methods described previously and in breast cancer therapeutics described hereafter. Certain breast cancer molecules are described in greater detail below.

[0143] Compounds

[0144] Compounds can be obtained using any of the numerous approaches in combinatorial library methods known in the art, including: biological libraries; peptoid libraries (libraries of molecules having the functionalities of peptides, but with a novel, non-peptide backbone which are resistant to enzymatic degradation but which nevertheless remain bioactive (see, e.g., Zuckermann et al., J. Med. Chem.37: 2678-85 (1994)); spatially addressable parallel solid phase or solution phase libraries; synthetic library methods requiring deconvolution; “one-bead one-compound” library methods; and synthetic library methods using affinity chromatography selection. Biological library and peptoid library approaches are typically limited to peptide libraries, while the other approaches are applicable to peptide, non-peptide oligomer or small molecule libraries of compounds (Lam, Anticancer Drug Des. 12: 145, (1997)). Examples of methods for synthesizing molecular libraries are described, for example, in DeWitt et al., Proc. Natl. Acad. Sci. U.S.A. 90: 6909 (1993); Erb et al., Proc. Natl. Acad. Sci. USA 91: 11422 (1994); Zuckermann et al., J. Med. Chem. 37: 2678 (1994); Cho et al., Science 261: 1303 (1993); Carrell et al., Angew. Chem. Int. Ed. Engl. 33: 2059 (1994); Carell et al., Angew. Chem. Int. Ed. Engl. 33: 2061 (1994); and in Gallop et al., J. Med. Chem. 37: 1233 (1994).

[0145] Libraries of compounds may be presented in solution (e.g., Houghten, Biotechniques 13: 412-421 (1992)), or on beads (Lam, Nature 354: 82-84 (1991)), chips (Fodor, Nature 364: 555-556 (1993)), bacteria or spores (Ladner, U.S. Pat. No. 5,223,409), plasmids (Cull et al., Proc. Natl. Acad. Sci. USA 89: 1865-1869 (1992)) or on phage (Scott and Smith, Science 249: 386-390 (1990); Devlin, Science 249: 404-406 (1990); Cwirla et al., Proc. Natl. Acad. Sci. 87: 6378-6382 (1990); Felici, J. Mol. Biol. 222: 301-310 (1991); Ladner supra.).

[0146] A compound sometimes alters expression and sometimes alters activity of a DLG1, KIAA0783, DPF3 or CENPC1 polypeptide and may be a small molecule. Small molecules include, but are not limited to, peptides, peptidomimetics (e.g., peptoids), amino acids, amino acid analogs, polynucleotides, polynucleotide analogs, nucleotides, nucleotide analogs, organic or inorganic compounds (i.e., including heteroorganic and organometallic compounds) having a molecular weight less than about 10,000 grams per mole, organic or inorganic compounds having a molecular weight less than about 5,000 grams per mole, organic or inorganic compounds having a molecular weight less than about 1,000 grams per mole, organic or inorganic compounds having a molecular weight less than about 500 grams per mole, and salts, esters, and other pharmaceutically acceptable forms of such compounds.

[0147] Antisense Nucleic Acid Molecules, Ribozymes, RNAi, siRNA and Modified Nucleic Acid Molecules

[0148] An “antisense” nucleic acid refers to a nucleotide sequence complementary to a “sense” nucleic acid encoding a polypeptide, e.g., complementary to the coding strand of a double-stranded cDNA molecule or complementary to an mRNA sequence. The antisense nucleic acid can be complementary to an entire coding strand in SEQ ID NO: 1-8, or to a portion thereof or a substantially identical sequence thereof. In another embodiment, the antisense nucleic acid molecule is antisense to a “noncoding region” of the coding strand of a nucleotide sequence in SEQ ID NO: 1-8 (e.g., 5′ and 3′ untranslated regions).

[0149] An antisense nucleic acid can be designed such that it is complementary to the entire coding region of an mRNA encoded by a nucleotide sequence in SEQ ID NO: 1-4 (e.g., SEQ ID NO: 6-11), and often the antisense nucleic acid is an oligonucleotide antisense to only a portion of a coding or noncoding region of the mRNA. For example, the antisense oligonucleotide can be complementary to the region surrounding the translation start site of the mRNA, e.g., between the −10 and +10 regions of the target gene nucleotide sequence of interest. An antisense oligonucleotide can be, for example, about 7, 10, 15, 20, 25, 30, 35, 40, 45, 50, 55, 60, 65, 70, 75, 80, or more nucleotides in length. The antisense nucleic acids, which include the ribozymes described hereafter, can be designed to target a nucleotide sequence in SEQ ID NO: 1-8, often a variant associated with breast cancer, or a substantially identical sequence thereof. Among the variants, minor alleles and major alleles can be targeted, and those associated with a higher risk of breast cancer are often designed, tested, and administered to subjects.

[0150] An antisense nucleic acid can be constructed using chemical synthesis and enzymatic ligation reactions using standard procedures. For example, an antisense nucleic acid (e.g., an antisense oligonucleotide) can be chemically synthesized using naturally occurring nucleotides or variously modified nucleotides designed to increase the biological stability of the molecules or to increase the physical stability of the duplex formed between the antisense and sense nucleic acids, e.g., phosphorothioate derivatives and acridine substituted nucleotides can be used. Antisense nucleic acid also can be produced biologically using an expression vector into which a nucleic acid has been subcloned in an antisense orientation (i.e., RNA transcribed from the inserted nucleic acid will be of an antisense orientation to a target nucleic acid of interest, described further in the following subsection).

[0151] When utilized as therapeutics, antisense nucleic acids typically are administered to a subject (e.g., by direct injection at a tissue site) or generated in situ such that they hybridize with or bind to cellular mRNA and/or genomic DNA encoding a polypeptide and thereby inhibit expression of the polypeptide, for example, by inhibiting transcription and/or translation. Alternatively, antisense nucleic acid molecules can be modified to target selected cells and then are administered systemically. For systemic administration, antisense molecules can be modified such that they specifically bind to receptors or antigens expressed on a selected cell surface, for example, by linking antisense nucleic acid molecules to peptides or antibodies which bind to cell surface receptors or antigens. Antisense nucleic acid molecules can also be delivered to cells using the vectors described herein. Sufficient intracellular concentrations of antisense molecules are achieved by incorporating a strong promoter, such as a pol II or pol III promoter, in the vector construct.

[0152] Antisense nucleic acid molecules sometimes are *-anomeric nucleic acid molecules. An *-anomeric nucleic acid molecule forms specific double-stranded hybrids with complementary RNA in which, contrary to the usual *-units, the strands run parallel to each other (Gaultier et al., Nucleic Acids. Res. 15: 6625-6641 (1987)). Antisense nucleic acid molecules can also comprise a 2′-o-methylribonucleotide (Inoue et al., Nucleic Acids Res. 15: 6131-6148 (1987)) or a chimeric RNA-DNA analogue (Inoue et al., FEBS Lett. 215: 327-330 (1987)). Antisense nucleic acids sometimes are composed of DNA or PNA or any other nucleic acid derivatives described previously.

[0153] In another embodiment, an antisense nucleic acid is a ribozyme. A ribozyme having specificity for a DLG1, KIAA0783, DPF3 or CENPC1 nucleotide sequence can include one or more sequences complementary to such a nucleotide sequence, and a sequence having a known catalytic region responsible for mRNA cleavage (see e.g., U.S. Pat. No. 5,093,246 or Haselhoff and Gerlach, Nature 334: 585-591 (1988)). For example, a derivative of a Tetrahymena L-19 IVS RNA is sometimes utilized in which the nucleotide sequence of the active site is complementary to the nucleotide sequence to be cleaved in a mRNA (see e.g., Cech et al. U.S. Pat. No. 4,987,071; and Cech et al. U.S. Pat. No. 5,116,742). Also, target mRNA sequences can be used to select a catalytic RNA having a specific ribonuclease activity from a pool of RNA molecules (see e.g., Bartel & Szostak, Science 261: 1411-1418 (1993)).

[0154] Breast cancer directed molecules include in certain embodiments nucleic acids that can form triple helix structures with a DLG1, KIAA0783, DPF3 or CENPC1 nucleotide sequence or a substantially identical sequence thereof, especially one that includes a regulatory region that controls expression of a polypeptide. Gene expression can be inhibited by targeting nucleotide sequences complementary to the regulatory region of a DLG1, KIAA0783, DPF3 or CENPC1 nucleotide sequence or a substantially identical sequence (e.g., promoter and/or enhancers) to form triple helical structures that prevent transcription of a gene in target cells (see e.g., Helene, Anticancer Drug Des. 6(6): 569-84 (1991); Helene et al., Ann. N.Y. Acad. Sci. 660: 27-36 (1992); and Maher, Bioassays 14(12): 807-15 (1992). Potential sequences that can be targeted for triple helix formation can be increased by creating a so-called “switchback” nucleic acid molecule. Switchback molecules are synthesized in an alternating 5′-3′, 3′-5′ manner, such that they base pair with first one strand of a duplex and then the other, eliminating the necessity for a sizeable stretch of either purines or pyrimidines to be present on one strand of a duplex.

[0155] Breast cancer directed molecules include RNAi and siRNA nucleic acids. Gene expression may be inhibited by the introduction of double-stranded RNA (dsRNA), which induces potent and specific gene silencing, a phenomenon called RNA interference or RNAi. See, e.g., Fire et al., U.S. Pat. No. 6,506,559; Tuschl et al. PCT International Publication No. WO 01/75164; Kay et al. PCT International Publication No. WO 03/010180A1; or Bosher J M, Labouesse, Nat Cell Biol 2000 February; 2(2):E31-6. This process has been improved by decreasing the size of the double-stranded RNA to 20-24 base pairs (to create small-interfering RNAs or siRNAs) that “switched off” genes in mammalian cells without initiating an acute phase response, i.e., a host defense mechanism that often results in cell death (see, e.g., Caplen et al. Proc Natl Acad Sci USA. 2001 Aug. 14; 98(17):9742-7 and Elbashir et al. Methods 2002 February; 26(2): 199-213). There is increasing evidence of post-transcriptional gene silencing by RNA interference (RNAi) for inhibiting targeted expression in mammalian cells at the mRNA level, in human cells. There is additional evidence of effective methods for inhibiting the proliferation and migration of tumor cells in human patients, and for inhibiting metastatic cancer development (see, e.g., U.S. Patent Application No. US2001000993183; Caplen et al. Proc Natl Acad Sci USA; and Abderrahmani et al. Mol Cell Biol 2001 Nov. 21(21):7256-67).

[0156] An “siRNA” or “RNAi” refers to a nucleic acid that forms a double stranded RNA and has the ability to reduce or inhibit expression of a gene or target gene when the siRNA is delivered to or expressed in the same cell as the gene or target gene. “siRNA” refers to short double-stranded RNA formed by the complementary strands. Complementary portions of the siRNA that hybridize to form the double stranded molecule often have substantial or complete identity to the target molecule sequence. In one embodiment, an siRNA refers to a nucleic acid that has substantial or complete identity to a target gene and forms a double stranded siRNA.

[0157] When designing the siRNA molecules, the targeted region often is selected from a given DNA sequence beginning 50 to 100 nucleotides downstream of the start codon. See, e.g., Elbashir et al., Methods 26:199-213 (2002). Initially, 5′ or 3′ UTRs and regions nearby the start codon were avoided assuming that UTR-binding proteins and/or translation initiation complexes may interfere with binding of the siRNP or RISC endonuclease complex. Sometimes regions of the target 23 nucleotides in length conforming to the sequence motif AA(N19)TT (N, an nucleotide), and regions with approximately 30% to 70% G/C-content (often about 50% G/C-content) often are selected. If no suitable sequences are found, the search often is extended using the motif NA(N21). The sequence of the sense siRNA sometimes corresponds to (N19) TT or N21 (position 3 to 23 of the 23-nt motif), respectively. In the latter case, the 3′ end of the sense siRNA often is converted to TT. The rationale for this sequence conversion is to generate a symmetric duplex with respect to the sequence composition of the sense and antisense 3′ overhangs. The antisense siRNA is synthesized as the complement to position 1 to 21 of the 23-nt motif. Because position 1 of the 23-nt motif is not recognized sequence-specifically by the antisense siRNA, the 3′-most nucleotide residue of the antisense siRNA can be chosen deliberately. However, the penultimate nucleotide of the antisense siRNA (complementary to position 2 of the 23-nt motif) often is complementary to the targeted sequence. For simplifying chemical synthesis, TT often is utilized. siRNAs corresponding to the target motif NAR(N17)YNN, where R is purine (A,G) and Y is pyrimidine (C,U), often are selected. Respective 21 nucleotide sense and antisense siRNAs often begin with a purine nucleotide and can also be expressed from pol III expression vectors without a change in targeting site. Expression of RNAs from pol III promoters often is efficient when the first transcribed nucleotide is a purine.

[0158] The sequence of the siRNA can correspond to the full length target gene, or a subsequence thereof. Often, the siRNA is about 15 to about 50 nucleotides in length (e.g., each complementary sequence of the double stranded siRNA is 15-50 nucleotides in length, and the double stranded siRNA is about 15-50 base pairs in length, sometimes about 20-30 nucleotides in length or about 20-25 nucleotides in length, e.g., 20, 21, 22, 23, 24, 25, 26, 27, 28, 29, or 30 nucleotides in length. The siRNA sometimes is about 21 nucleotides in length. Methods of using siRNA are well known in the art, and specific siRNA molecules may be purchased from a number of companies including Dharmacon Research, Inc. Antisense, ribozyme, RNAi and siRNA nucleic acids can be altered to form modified nucleic acid molecules. The nucleic acids can be altered at base moieties, sugar moieties or phosphate backbone moieties to improve stability, hybridization, or solubility of the molecule. For example, the deoxyribose phosphate backbone of nucleic acid molecules can be modified to generate peptide nucleic acids (see Hyrup et al., Bioorganic & Medicinal Chemistry 4 (1): 5-23 (1996)). As used herein, the terms “peptide nucleic acid” or “PNA” refers to a nucleic acid mimic such as a DNA mimic, in which the deoxyribose phosphate backbone is replaced by a pseudopeptide backbone and only the four natural nucleobases are retained. The neutral backbone of a PNA can allow for specific hybridization to DNA and RNA under conditions of low ionic strength. Synthesis of PNA oligomers can be performed using standard solid phase peptide synthesis protocols as described, for example, in Hyrup et al., (1996) supra and Perry-O'Keefe et al., Proc. Natl. Acad. Sci. 93: 14670-675 (1996).

[0159] PNA nucleic acids can be used in prognostic, diagnostic, and therapeutic applications. For example, PNAs can be used as antisense or antigene agents for sequence-specific modulation of gene expression by, for example, inducing transcription or translation arrest or inhibiting replication. PNA nucleic acid molecules can also be used in the analysis of single base pair mutations in a gene, (e.g., by PNA-directed PCR clamping); as “artificial restriction enzymes” when used in combination with other enzymes, (e.g., SI nucleases (Hyrup (1996) supra)); or as probes or primers for DNA sequencing or hybridization (Hyrup et al., (1996) supra; Perry-O'Keefe supra).

[0160] In other embodiments, oligonucleotides may include other appended groups such as peptides (e.g., for targeting host cell receptors in vivo), or agents facilitating transport across cell membranes (see e.g., Letsinger et al., Proc. Natl. Acad. Sci. USA 86: 6553-6556 (1989); Lemaitre et al., Proc. Natl. Acad. Sci. USA 84: 648-652 (1987); PCT Publication No. W088/09810) or the blood-brain barrier (see, e.g., PCT Publication No. W089/10134). In addition, oligonucleotides can be modified with hybridization-triggered cleavage agents (See, e.g., Krol et al., Bio-Techniques 6: 958-976 (1988)) or intercalating agents. (See, e.g., Zon, Pharm. Res. 5: 539-549 (1988) ). To this end, the oligonucleotide may be conjugated to another molecule, (e.g., a peptide, hybridization triggered cross-linking agent, transport agent, or hybridization-triggered cleavage agent).

[0161] Also included herein are molecular beacon oligonucleotide primer and probe molecules having one or more regions complementary to a nucleotide sequence of SEQ ID NO: 1-8 or a substantially identical sequence thereof, two complementary regions one having a fluorophore and one a quencher such that the molecular beacon is useful for quantifying the presence of the nucleic acid in a sample. Molecular beacon nucleic acids are described, for example, in Lizardi et al., U.S. Pat. No. 5,854,033; Nazarenko et al., U.S. Pat. No. 5,866,336, and Livak et al., U.S. Pat. No. 5,876,930.

[0162] Antibodies

[0163] The term “antibody” as used herein refers to an immunoglobulin molecule or immunologically active portion thereof, i.e., an antigen-binding portion. Examples of immunologically active portions of immunoglobulin molecules include F(ab) and F(ab′)₂ fragments which can be generated by treating the antibody with an enzyme such as pepsin. An antibody sometimes is a polyclonal, monoclonal, recombinant (e.g., a chimeric or humanized), fully human, non-human (e.g., murine), or a single chain antibody. An antibody may have effector function and can fix complement, and is sometimes coupled to a toxin or imaging agent.

[0164] A full-length polypeptide or antigenic peptide fragment encoded by a DLG1, KIAA0783, DPF3 or CENPC1 nucleotide sequence can be used as an immunogen or can be used to identify antibodies made with other immunogens, e.g., cells, membrane preparations, and the like. An antigenic peptide often includes at least 8 amino acid residues of the amino acid sequences encoded by a nucleotide sequence of SEQ ID NO: 1-8, or substantially identical sequence thereof, and encompasses an epitope. Antigenic peptides sometimes include 10 or more amino acids, 15 or more amino acids, 20 or more amino acids, or 30 or more amino acids. Hydrophilic and hydrophobic fragments of polypeptides sometimes are used as immunogens.

[0165] Epitopes encompassed by the antigenic peptide are regions located on the surface of the polypeptide (e.g., hydrophilic regions) as well as regions with high antigenicity. For example, an Emini surface probability analysis of the human polypeptide sequence can be used to indicate the regions that have a particularly high probability of being localized to the surface of the polypeptide and are thus likely to constitute surface residues useful for targeting antibody production. The antibody may bind an epitope on any domain or region on polypeptides described herein.

[0166] Also, chimeric, humanized, and completely human antibodies are useful for applications which include repeated administration to subjects. Chimeric and humanized monoclonal antibodies, comprising both human and non-human portions, can be made using standard recombinant DNA techniques. Such chimeric and humanized monoclonal antibodies can be produced by recombinant DNA techniques known in the art, for example using methods described in Robinson et al International Application No. PCT/US86/02269; Akira, et al European Patent Application 184,187; Taniguchi, M., European Patent Application 171,496; Morrison et al European Patent Application 173,494; Neuberger et al PCT International Publication No. WO 86/01533; Cabilly et al U.S. Pat. No. 4,816,567; Cabilly et al European Patent Application 125,023; Better et al., Science 240: 1041-1043 (1988); Liu et al., Proc. Natl. Acad. Sci. USA 84: 3439-3443 (1987); Liu et al., J. Immunol. 139: 3521-3526 (1987); Sun et al., Proc. Natl. Acad. Sci. USA 84: 214-218 (1987); Nishimura et al., Canc. Res. 47: 999-1005 (1987); Wood et al., Nature 314: 446-449 (1985); and Shaw et al., J. Natl. Cancer Inst. 80: 1553-1559 (1988); Morrison, S. L., Science 229: 1202-1207 (1985); Oi et al., BioTechniques 4: 214 (1986); Winter U.S. Pat. No. 5,225,539; Jones et al., Nature 321: 552-525 (1986); Verhoeyan et al., Science 239: 1534; and Beidler et al., J. Immunol. 141: 4053-4060 (1988).

[0167] Completely human antibodies are particularly desirable for therapeutic treatment of human patients. Such antibodies can be produced using transgenic mice that are incapable of expressing endogenous immunoglobulin heavy and light chains genes, but which can express human heavy and light chain genes. See, for example, Lonberg and Huszar, Int. Rev. Immunol. 13: 65-93 (1995); and U.S. Pat. Nos. 5,625,126; 5,633,425; 5,569,825; 5,661,016; and 5,545,806. In addition, companies such as Abgenix, Inc. (Fremont, Calif.) and Medarex, Inc. (Princeton, N.J.), can be engaged to provide human antibodies directed against a selected antigen using technology similar to that described above. Completely human antibodies that recognize a selected epitope also can be generated using a technique referred to as “guided selection.” In this approach a selected non-human monoclonal antibody (e.g., a murine antibody) is used to guide the selection of a completely human antibody recognizing the same epitope. This technology is described for example by Jespers et al., Bio/Technology 12: 899-903 (1994).

[0168] Antibody can be a single chain antibody. A single chain antibody (scFV) can be engineered (see, e.g., Colcher et al., Ann. NY Acad. Sci. 880: 263-80 (1999); and Reiter, Clin. Cancer Res. 2: 245-52 (1996)). Single chain antibodies can be dimerized or multimerized to generate multivalent antibodies having specificities for different epitopes of the same target polypeptide.

[0169] Antibodies also may be selected or modified so that they exhibit reduced or no ability to bind an Fc receptor. For example, an antibody may be an isotype or subtype, fragment or other mutant, which does not support binding to an Fc receptor (e.g., it has a mutagenized or deleted Fc receptor binding region).

[0170] Also, an antibody (or fragment thereof) may be conjugated to a therapeutic moiety such as a cytotoxin, a therapeutic agent or a radioactive metal ion. A cytotoxin or cytotoxic agent includes any agent that is detrimental to cells. Examples include taxol, cytochalasin B, gramicidin D, ethidium bromide, emetine, mitomycin, etoposide, tenoposide, vincristine, vinblastine, colchicin, doxorubicin, daunorubicin, dihydroxy anthracin dione, mitoxantrone, mithramycin, actinomycin D, 1 dehydrotestosterone, glucocorticoids, procaine, tetracaine, lidocaine, propranolol, and puromycin and analogs or homologs thereof. Therapeutic agents include, but are not limited to, antimetabolites (e.g., methotrexate, 6-mercaptopurine, 6-thioguanine, cytarabine, 5-fluorouracil decarbazine), alkylating agents (e.g., mechlorethamine, thiotepa chlorambucil, melphalan, carmustine (BCNU) and lomustine (CCNU), cyclophosphamide, busulfan, dibromomannitol, streptozotocin, mitomycin C, and cis-dichlorodiamine platinum (II) (DDP) cisplatin), anthracyclines (e.g., daunorubicin (formerly daunomycin) and doxorubicin), antibiotics (e.g., dactinomycin (formerly actinomycin), bleomycin, mithramycin, and anthramycin (AMC)), and anti-mitotic agents (e.g., vincristine and vinblastine).

[0171] Antibody conjugates can be used for modifying a given biological response. For example, the drug moiety may be a protein or polypeptide possessing a desired biological activity. Such proteins may include, for example, a toxin such as abrin, ricin A, pseudomonas exotoxin, or diphtheria toxin; a polypeptide such as tumor necrosis factor, γ-interferon, α-interferon, nerve growth factor, platelet derived growth factor, tissue plasminogen activator; or, biological response modifiers such as, for example, lymphokines, interleukin-1 (“IL-1”), interleukin-2 (“IL-2”), interleukin-6 (“IL-6”), granulocyte macrophage colony stimulating factor (“GM-CSF”), granulocyte colony stimulating factor (“G-CSF”), or other growth factors. Also, an antibody can be conjugated to a second antibody to form an antibody heteroconjugate as described by Segal in U.S. Pat. No. 4,676,980, for example.

[0172] An antibody (e.g., monoclonal antibody) can be used to isolate target polypeptides by standard techniques, such as affinity chromatography or immunoprecipitation. Moreover, an antibody can be used to detect a target polypeptide (e.g., in a cellular lysate or cell supernatant) in order to evaluate the abundance and pattern of expression of the polypeptide. Antibodies can be used diagnostically to monitor polypeptide levels in tissue as part of a clinical testing procedure, e.g., to determine the efficacy of a given treatment regimen. Detection can be facilitated by coupling (i.e., physically linking) the antibody to a detectable substance (i.e., antibody labeling). Examples of detectable substances include various enzymes, prosthetic groups, fluorescent materials, luminescent materials, bioluminescent materials, and radioactive materials. Examples of suitable enzymes include horseradish peroxidase, alkaline phosphatase, β-galactosidase, or acetylcholinesterase; examples of suitable prosthetic group complexes include streptavidin/biotin and avidin/biotin; examples of suitable fluorescent materials include umbelliferone, fluorescein, fluorescein isothiocyanate, rhodamine, dichlorotriazinylamine fluorescein, dansyl chloride or phycoerythrin; an example of a luminescent material includes luminol; examples of bioluminescent materials include luciferase, luciferin, and aequorin, and examples of suitable radioactive material include ¹²⁵I, ¹³¹I, ³⁵S or ³H. Also, an antibody can be utilized as a test molecule for determining whether it can treat breast cancer, and as a therapeutic for administration to a subject for treating breast cancer.

[0173] An antibody can be made by immunizing with a purified antigen, or a fragment thereof, e.g., a fragment described herein, a membrane associated antigen, tissues, e.g., crude tissue preparations, whole cells, preferably living cells, lysed cells, or cell fractions.

[0174] Included herein are antibodies which bind only a native polypeptide, only denatured or otherwise non-native polypeptide, or which bind both, as well as those having linear or conformational epitopes. Conformational epitopes sometimes can be identified by selecting antibodies that bind to native but not denatured polypeptide. Also featured are antibodies that specifically bind to a polypeptide variant associated with breast cancer.

[0175] Screening Assays

[0176] Featured herein are methods for identifying a candidate therapeutic for treating breast cancer. The methods comprise contacting a test molecule with a target molecule in a system. A “target molecule” as used herein refers to a nucleic acid of SEQ ID NO: 1-8, a substantially identical nucleic acid thereof, or a fragment thereof, and an encoded polypeptide of the foregoing. The method also comprises determining the presence or absence of an interaction between the test molecule and the target molecule, where the presence of an interaction between the test molecule and the nucleic acid or polypeptide identifies the test molecule as a candidate breast cancer therapeutic. The interaction between the test molecule and the target molecule may be quantified.

[0177] Test molecules and candidate therapeutics include, but are not limited to, compounds, antisense nucleic acids, siRNA molecules, ribozymes, polypeptides or proteins encoded by a DLG1, KIAA0783, DPF3 or CENPC1 nucleic acids, or a substantially identical sequence or fragment thereof, and immunotherapeutics (e.g., antibodies and HLA-presented polypeptide fragments). A test molecule or candidate therapeutic may act as a modulator of target molecule concentration or target molecule function in a system. A “modulator” may agonize (i.e., up-regulates) or antagonize (i.e., down-regulates) a target molecule concentration partially or completely in a system by affecting such cellular functions as DNA replication and/or DNA processing (e.g., DNA methylation or DNA repair), RNA transcription and/or RNA processing (e.g., removal of intronic sequences and/or translocation of spliced mRNA from the nucleus), polypeptide production (e.g., translation of the polypeptide from mRNA), and/or polypeptide post-translational modification (e.g., glycosylation, phosphorylation, and proteolysis of pro-polypeptides). A modulator may also agonize or antagonize a biological function of a target molecule partially or completely, where the function may include adopting a certain structural conformation, interacting with one or more binding partners, ligand binding, catalysis (e.g., phosphorylation, dephosphorylation, hydrolysis, methylation, and isomerization), and an effect upon a cellular event (e.g., effecting progression of breast cancer).

[0178] As used herein, the term “system” refers to a cell free in vitro environment and a cell-based environment such as a collection of cells, a tissue, an organ, or an organism. A system is “contacted” with a test molecule in a variety of manners, including adding molecules in solution and allowing them to interact with one another by diffusion, cell injection, and any administration routes in an animal. As used herein, the term “interaction” refers to an effect of a test molecule on test molecule, where the effect sometimes is binding between the test molecule and the target molecule, and sometimes is an observable change in cells, tissue, or organism.

[0179] There are many standard methods for detecting the presence or absence of an interaction between a test molecule and a target molecule. For example, titrametric, acidimetric, radiometric, NMR, monolayer, polarographic, spectrophotometric, fluorescent, and ESR assays probative of a target molecule interaction may be utilized.

[0180] In general, an interaction can be determined by labeling the test molecule and/or the DLG1, KIAA0783, DPF3 or CENPC1 molecule, where the label is covalently or non-covalently attached to the test molecule or DLG1, KIAA0783, DPF3 or CENPC1 molecule. The label is sometimes a radioactive molecule such as ¹²⁵I, ¹³¹I, ³⁵S or ³H, which can be detected by direct counting of radioemission or by scintillation counting. Also, enzymatic labels such as horseradish peroxidase, alkaline phosphatase, or luciferase may be utilized where the enzymatic label can be detected by determining conversion of an appropriate substrate to product. Also, presence or absence of an interaction can be determined without labeling. For example, a microphysiometer (e.g., Cytosensor) is an analytical instrument that measures the rate at which a cell acidifies its environment using a light-addressable potentiometric sensor (LAPS). Changes in this acidification rate can be used as an indication of an interaction between a test molecule and DLG1, KIAA0783, DPF3 or CENPC1 (McConnell, H. M. et al., Science 257:1906-1912 (1992)).

[0181] In cell-based systems, cells typically include a DLG1, KIAA0783, DPF3 or CENPC1 nucleic acid or polypeptide or variants thereof and are often of mammalian origin, although the cell can be of any origin. Whole cells, cell homogenates, and cell fractions (e.g., cell membrane fractions) can be subjected to analysis. Where interactions between a test molecule with a DLG1, KIAA0783, DPF3 or CENPC1 polypeptide or variant thereof are monitored, soluble and/or membrane bound forms of the polypeptide or variant may be utilized. Where membrane-bound forms of the polypeptide are used, it may be desirable to utilize a solubilizing agent. Examples of such solubilizing agents include non-ionic detergents such as n-octylglucoside, n-dodecylglucoside, n-dodecylmaltoside, octanoyl-N-methylglucamide, decanoyl-N-methylglucamide, Triton® X-100, Triton® X-114, Thesit®, Isotridecypoly(ethylene glycol ether)n, 3-[(3-cholamidopropyl)dimethylamminio]-1-propane sulfonate (CHAPS), 3-[(3-cholamidopropyl)dimethylamminio]-2-hydroxy-1-propane sulfonate (CHAPSO), or N-dodecyl-N,N-dimethyl-3-ammonio-1-propane sulfonate.

[0182] An interaction between two molecules also can be detected by monitoring fluorescence energy transfer (FET) (see, for example, Lakowicz et al., U.S. Pat. No. 5,631,169; Stavrianopoulos et al. U.S. Pat. No. 4,868,103). A fluorophore label on a first, “donor” molecule is selected such that its emitted fluorescent energy will be absorbed by a fluorescent label on a second, “acceptor” molecule, which in turn is able to fluoresce due to the absorbed energy. Alternately, the “donor” polypeptide molecule may simply utilize the natural fluorescent energy of tryptophan residues. Labels are chosen that emit different wavelengths of light, such that the “acceptor” molecule label may be differentiated from that of the “donor”. Since the efficiency of energy transfer between the labels is related to the distance separating the molecules, the spatial relationship between the molecules can be assessed. In a situation in which binding occurs between the molecules, the fluorescent emission of the “acceptor” molecule label in the assay should be maximal. An FET binding event can be conveniently measured through standard fluorometric detection means well known in the art (e.g., using a fluorimeter).

[0183] In another embodiment, determining the presence or absence of an interaction between a test molecule and a DLG1, KIAA0783, DPF3 or CENPC1 molecule can be effected by using real-time Biomolecular interaction Analysis (BIA) (see, e.g., Sjolander & Urbaniczk, Anal. Chem. 63: 2338-2345 (1991) and Szabo et al., Curr. Opin. Struct. Biol. 5: 699-705 (1995)). “Surface plasmon resonance” or “BIA” detects biospecific interactions in real time, without labeling any of the interactants (e.g., BIAcore). Changes in the mass at the binding surface (indicative of a binding event) result in alterations of the refractive index of light near the surface (the optical phenomenon of surface plasmon resonance (SPR)), resulting in a detectable signal which can be used as an indication of real-time reactions between biological molecules.

[0184] In another embodiment, the DLG1, KIAA0783, DPF3 or CENPC1 molecule or test molecules are anchored to a solid phase. The DLG1, KIAA0783, DPF3 or CENPC1 molecule/test molecule complexes anchored to the solid phase can be detected at the end of the reaction. The target DLG1, KIAA0783, DPF3 or CENPC1 molecule is often anchored to a solid surface, and the test molecule, which is not anchored, can be labeled, either directly or indirectly, with detectable labels discussed herein.

[0185] It may be desirable to immobilize a DLG1, KIAA0783, DPF3 or CENPC1 molecule, an anti-DLG1, KIAA0783, DPF3 or CENPC1 antibody, or test molecules to facilitate separation of complexed from uncomplexed forms of DLG1, KIAA0783, DPF3 or CENPC1 molecules and test molecules, as well as to accommodate automation of the assay. Binding of a test molecule to a DLG1, KIAA0783, DPF3 or CENPC1 molecule can be accomplished in any vessel suitable for containing the reactants. Examples of such vessels include microtiter plates, test tubes, and micro-centrifuge tubes. In one embodiment, a fusion polypeptide can be provided which adds a domain that allows a DLG1, KIAA0783, DPF3 or CENPC1 molecule to be bound to a matrix. For example, glutathione-S-transferase/DLG1, KIAA0783, DPF3 or CENPC1 fusion polypeptides or glutathione-S-transferase/target fusion polypeptides can be adsorbed onto glutathione sepharose beads (Sigma Chemical, St. Louis, Mo.) or glutathione derivitized microtiter plates, which are then combined with the test compound or the test compound and either the non-adsorbed target polypeptide or DLG1, KIAA0783, DPF3 or CENPC1 polypeptide, and the mixture incubated under conditions conducive to complex formation (e.g., at physiological conditions for salt and pH). Following incubation, the beads or microtiter plate wells are washed to remove any unbound components, the matrix immobilized in the case of beads, complex determined either directly or indirectly, for example, as described above. Alternatively, the complexes can be dissociated from the matrix, and the level of DLG1, KIAA0783, DPF3 or CENPC1 binding or activity determined using standard techniques.

[0186] Other techniques for immobilizing a DLG1, KIAA0783, DPF3 or CENPC1 molecule on matrices include using biotin and streptavidin. For example, biotinylated DLG1, KIAA0783, DPF3 or CENPC1 polypeptide or target molecules can be prepared from biotin-NHS (N-hydroxy-succinimide) using techniques known in the art (e.g., biotinylation kit, Pierce Chemicals, Rockford, Ill.), and immobilized in the wells of streptavidin-coated 96 well plates (Pierce Chemical).

[0187] In order to conduct the assay, the non-immobilized component is added to the coated surface containing the anchored component. After the reaction is complete, unreacted components are removed (e.g., by washing) under conditions such that any complexes formed will remain immobilized on the solid surface. The detection of complexes anchored on the solid surface can be accomplished in a number of ways. Where the previously non-immobilized component is pre-labeled, the detection of label immobilized on the surface indicates that complexes were formed. Where the previously non-immobilized component is not pre-labeled, an indirect label can be used to detect complexes anchored on the surface; e.g., using a labeled antibody specific for the immobilized component (the antibody, in turn, can be directly labeled or indirectly labeled with, e.g., a labeled anti-Ig antibody).

[0188] In one embodiment, this assay is performed utilizing antibodies reactive with DLG1, KIAA0783, DPF3 or CENPC1 polypeptide or test molecules but which do not interfere with binding of the DLG1, KIAA0783, DPF3 or CENPC1 polypeptide to its test molecule. Such antibodies can be derivitized to the wells of the plate, and unbound target or DLG1, KIAA0783, DPF3 or CENPC1 polypeptide trapped in the wells by antibody conjugation. Methods for detecting such complexes, in addition to those described above for the GST-immobilized complexes, include immunodetection of complexes using antibodies reactive with the DLG1, KIAA0783, DPF3 or CENPC1 polypeptide or target molecule, as well as enzyme-linked assays which rely on detecting an enzymatic activity associated with the DLG1, KIAA0783, DPF3 or CENPC1 polypeptide or test molecule.

[0189] Alternatively, cell free assays can be conducted in a liquid phase. In such an assay, the reaction products are separated from unreacted components, by any of a number of standard techniques, including but not limited to: differential centrifugation (see, for example, Rivas, G., and Minton, A. P., Trends Biochem Sci August; 18(8): 284-7 (1993)); chromatography (gel filtration chromatography, ion-exchange chromatography); electrophoresis (see, e.g., Ausubel et al., eds. Current Protocols in Molecular Biology, J. Wiley: New York (1999)); and immunoprecipitation (see, for example, Ausubel, F. et al., eds. Current Protocols in Molecular Biology, J. Wiley: New York (1999)). Such resins and chromatographic techniques are known to one skilled in the art (see, e.g., Heegaard, J Mol. Recognit. Winter; 11(1-6): 141-8 (1998); Hage & Tweed, J. Chromatogr. B Biomed. Sci. Appl. October 10; 699 (1-2): 499-525 (1997)). Further, fluorescence energy transfer may also be conveniently utilized, as described herein, to detect binding without further purification of the complex from solution.

[0190] In another embodiment, modulators of DLG1, KIAA0783, DPF3 or CENPC1 expression are identified. For example, a cell or cell free mixture is contacted with a candidate compound and the expression of DLG1, KIAA0783, DPF3 or CENPC1 mRNA or polypeptide evaluated relative to the level of expression of DLG1, KIAA0783, DPF3 or CENPC1 mRNA or polypeptide in the absence of the candidate compound. When expression of DLG1, KIAA0783, DPF3 or CENPC1 mRNA or polypeptide is greater in the presence of the candidate compound than in its absence, the candidate compound is identified as a stimulator of DLG1, KIAA0783, DPF3 or CENPC1 mRNA or polypeptide expression. Alternatively, when expression of DLG1, KIAA0783, DPF3 or CENPC1 mRNA or polypeptide is less (statistically significantly less) in the presence of the candidate compound than in its absence, the candidate compound is identified as an inhibitor of DLG1, KIAA0783, DPF3 or CENPC1 mRNA or polypeptide expression. The level of DLG1, KIAA0783, DPF3 or CENPC1 mRNA or polypeptide expression can be determined by methods described herein for detecting DLG1, KIAA0783, DPF3 or CENPC1 mRNA or polypeptide.

[0191] In another embodiment, binding partners that interact with a DLG1, KIAA0783, DPF3 or CENPC1 molecule are detected. The DLG1, KIAA0783, DPF3 or CENPC1 molecules can interact with one or more cellular or extracellular macromolecules, such as polypeptides, in vivo, and these molecules that interact with DLG1, KIAA0783, DPF3 or CENPC1 molecules are referred to herein as “binding partners.” Molecules that disrupt such interactions can be useful in regulating the activity of the target gene product. Such molecules can include, but are not limited to molecules such as antibodies, peptides, and small molecules. Target genes/products for use in this embodiment often are the DLG1, KIAA0783, DPF3 or CENPC1 genes herein identified. In an alternative embodiment, provided is a method for determining the ability of the test compound to modulate the activity of a DLG1, KIAA0783, DPF3 or CENPC1 polypeptide through modulation of the activity of a downstream effector of a DLG1, KIAA0783, DPF3 or CENPC1 target molecule. For example, the activity of the effector molecule on an appropriate target can be determined, or the binding of the effector to an appropriate target can be determined, as previously described.

[0192] To identify compounds that interfere with the interaction between the target gene product and its cellular or extracellular binding partner(s), e.g., a substrate, a reaction mixture containing the target gene product and the binding partner is prepared, under conditions and for a time sufficient, to allow the two products to form complex. In order to test an inhibitory agent, the reaction mixture is provided in the presence and absence of the test compound. The test compound can be initially included in the reaction mixture, or can be added at a time subsequent to the addition of the target gene and its cellular or extracellular binding partner. Control reaction mixtures are incubated without the test compound or with a placebo. The formation of any complexes between the target gene product and the cellular or extracellular binding partner is then detected. The formation of a complex in the control reaction, but not in the reaction mixture containing the test compound, indicates that the compound interferes with the interaction of the target gene product and the interactive binding partner. Additionally, complex formation within reaction mixtures containing the test compound and normal target gene product can also be compared to complex formation within reaction mixtures containing the test compound and mutant target gene product. This comparison can be important in those cases where it is desirable to identify compounds that disrupt interactions of mutant but not normal target gene products.

[0193] These assays can be conducted in a heterogeneous or homogeneous format. Heterogeneous assays involve anchoring either the target gene product or the binding partner onto a solid phase, and detecting complexes anchored on the solid phase at the end of the reaction. In homogeneous assays, the entire reaction is carried out in a liquid phase. In either approach, the order of addition of reactants can be varied to obtain different information about the compounds being tested. For example, test compounds that interfere with the interaction between the target gene products and the binding partners, e.g., by competition, can be identified by conducting the reaction in the presence of the test substance. Alternatively, test compounds that disrupt preformed complexes, e.g., compounds with higher binding constants that displace one of the components from the complex, can be tested by adding the test compound to the reaction mixture after complexes have been formed. The various formats are briefly described below.

[0194] In a heterogeneous assay system, either the target gene product or the interactive cellular or extracellular binding partner, is anchored onto a solid surface (e.g., a microtiter plate), while the non-anchored species is labeled, either directly or indirectly. The anchored species can be immobilized by non-covalent or covalent attachments. Alternatively, an immobilized antibody specific for the species to be anchored can be used to anchor the species to the solid surface.

[0195] In order to conduct the assay, the partner of the immobilized species is exposed to the coated surface with or without the test compound. After the reaction is complete, unreacted components are removed (e.g., by washing) and any complexes formed will remain immobilized on the solid surface. Where the non-immobilized species is pre-labeled, the detection of label immobilized on the surface indicates that complexes were formed. Where the non-immobilized species is not pre-labeled, an indirect label can be used to detect complexes anchored on the surface; e.g., using a labeled antibody specific for the initially non-immobilized species (the antibody, in turn, can be directly labeled or indirectly labeled with, e.g., a labeled anti-Ig antibody). Depending upon the order of addition of reaction components, test compounds that inhibit complex formation or that disrupt preformed complexes can be detected.

[0196] Alternatively, the reaction can be conducted in a liquid phase in the presence or absence of the test compound, the reaction products separated from unreacted components, and complexes detected; e.g., using an immobilized antibody specific for one of the binding components to anchor any complexes formed in solution, and a labeled antibody specific for the other partner to detect anchored complexes. Again, depending upon the order of addition of reactants to the liquid phase, test compounds that inhibit complex or that disrupt preformed complexes can be identified.

[0197] In an alternate embodiment, a homogeneous assay can be used. For example, a preformed complex of the target gene product and the interactive cellular or extracellular binding partner product is prepared in that either the target gene products or their binding partners are labeled, but the signal generated by the label is quenched due to complex formation (see, e.g., U.S. Pat. No. 4,109,496 that utilizes this approach for immunoassays). The addition of a test substance that competes with and displaces one of the species from the preformed complex will result in the generation of a signal above background. In this way, test substances that disrupt target gene product-binding partner interaction can be identified.

[0198] Also, binding partners of DLG1, KIAA0783, DPF3 or CENPC1 molecules can be identified in a two-hybrid assay or three-hybrid assay (see, e.g., U.S. Pat. No. 5,283,317; Zervos et al., Cell 72:223-232 (1993); Madura et al., J. Biol. Chem. 268: 12046-12054 (1993); Bartel et al., Biotechniques 14: 920-924 (1993); Iwabuchi et al., Oncogene 8: 1693-1696 (1993); and Brent WO94/10300), to identify other polypeptides, which bind to or interact with DLG1, KIAA0783, DPF3 or CENPC1 (“DLG1, KIAA0783, DPF3 or CENPC1-binding polypeptides” or “DLG1, KIAA0783, DPF3 or CENPC1-bp”) and are involved in DLG1, KIAA0783, DPF3 or CENPC1 activity. Such DLG1, KIAA0783, DPF3 or CENPC1-bps can be activators or inhibitors of signals by the DLG1, KIAA0783, DPF3 or CENPC1 polypeptides or DLG1, KIAA0783, DPF3 or CENPC1 targets as, for example, downstream elements of a DLG1, KIAA0783, DPF3 or CENPC1-mediated signaling pathway.

[0199] A two-hybrid system is based on the modular nature of most transcription factors, which consist of separable DNA-binding and activation domains. Briefly, the assay utilizes two different DNA constructs. In one construct, the gene that codes for a DLG1, KIAA0783, DPF3 or CENPC1 polypeptide is fused to a gene encoding the DNA binding domain of a known transcription factor (e.g., GAL4). In the other construct, a DNA sequence, from a library of DNA sequences, that encodes an unidentified polypeptide (“prey” or “sample”) is fused to a gene that codes for the activation domain of the known transcription factor. (Alternatively the: DLG1, KIAA0783, DPF3 or CENPC1 polypeptide can be the fused to the activator domain.) If the “bait” and the “prey” polypeptides are able to interact, in vivo, forming a DLG1, KIAA0783, DPF3 or CENPC1-dependent complex, the DNA-binding and activation domains of the transcription factor are brought into close proximity. This proximity allows transcription of a reporter gene (e.g., LacZ) which is operably linked to a transcriptional regulatory site responsive to the transcription factor. Expression of the reporter gene can be detected and cell colonies containing the functional transcription factor can be isolated and used to obtain the cloned gene which encodes the polypeptide which interacts with the DLG1, KIAA0783, DPF3 or CENPC1 polypeptide.

[0200] Candidate therapeutics for treating breast cancer are identified from a group of test molecules that interact with a DLG1, KIAA0783, DPF3 or CENPC1 nucleic acid or polypeptide. Test molecules are normally ranked according to the degree with which they interact or modulate (e.g., agonize or antagonize) DNA replication and/or processing, RNA transcription and/or processing, polypeptide production and/or processing, and/or function of DLG1, KIAA0783, DPF3 or CENPC1 molecules, for example, and then top ranking modulators are selected. In a preferred embodiment, the candidate therapeutic (i.e., test molecule) acts as a DLG1, KIAA0783, DPF3 or CENPC1 antagonist. Also, pharmacogenomic information described herein can determine the rank of a modulator. Candidate therapeutics typically are formulated for administration to a subject.

[0201] Therapeutic Treatments

[0202] Formulations or pharmaceutical compositions typically include in combination with a pharmaceutically acceptable carrier, a compound, an antisense nucleic acid, a ribozyme, an antibody, a binding partner that interacts with a DLG1, KIAA0783, DPF3 or CENPC1 polypeptide, a DLG1, KIAA0783, DPF3 or CENPC1 nucleic acid, or a fragment thereof. The formulated molecule may be one that is identified by a screening method described above. Also, formulations may comprise a DLG1, KIAA0783, DPF3 or CENPC1 polypeptide or fragment thereof. As used herein, the term “pharmaceutically acceptable carrier” includes solvents, dispersion media, coatings, antibacterial and antifungal agents, isotonic and absorption delaying agents, and the like, compatible with pharmaceutical administration. Supplementary active compounds can also be incorporated into the compositions.

[0203] A pharmaceutical composition is formulated to be compatible with its intended route of administration. Examples of routes of administration include parenteral, e.g., intravenous, intradermal, subcutaneous, oral (e.g., inhalation), transdermal (topical), transmucosal, and rectal administration. Solutions or suspensions used for parenteral, intradermal, or subcutaneous application can include the following components: a sterile diluent such as water for injection, saline solution, fixed oils, polyethylene glycols, glycerin, propylene glycol or other synthetic solvents; antibacterial agents such as benzyl alcohol or methyl parabens; antioxidants such as ascorbic acid or sodium bisulfite; chelating agents such as ethylenediaminetetraacetic acid; buffers such as acetates, citrates or phosphates and agents for the adjustment of tonicity such as sodium chloride or dextrose. pH can be adjusted with acids or bases, such as hydrochloric acid or sodium hydroxide. The parenteral preparation can be enclosed in ampoules, disposable syringes or multiple dose vials made of glass or plastic.

[0204] Oral compositions generally include an inert diluent or an edible carrier. For the purpose of oral therapeutic administration, the active compound can be incorporated with excipients and used in the form of tablets, troches, or capsules, e.g., gelatin capsules. Oral compositions can also be prepared using a fluid carrier for use as a mouthwash. Pharmaceutically compatible binding agents, and/or adjuvant materials can be included as part of the composition. The tablets, pills, capsules, troches and the like can contain any of the following ingredients, or compounds of a similar nature: a binder such as microcrystalline cellulose, gum tragacanth or gelatin; an excipient such as starch or lactose, a disintegrating agent such as alginic acid, Primogel, or corn starch; a lubricant such as magnesium stearate or Sterotes; a glidant such as colloidal silicon dioxide; a sweetening agent such as sucrose or saccharin; or a flavoring agent such as peppermint, methyl salicylate, or orange flavoring.

[0205] Pharmaceutical compositions suitable for injectable use include sterile aqueous solutions (where water soluble) or dispersions and sterile powders for the extemporaneous preparation of sterile injectable solutions or dispersion. For intravenous administration, suitable carriers include physiological saline, bacteriostatic water, Cremophor EL™ (BASF, Parsippany, N.J.) or phosphate buffered saline (PBS). In all cases, the composition must be sterile and should be fluid to the extent that easy syringability exists. It should be stable under the conditions of manufacture and storage and must be preserved against the contaminating action of microorganisms such as bacteria and fungi. The carrier can be a solvent or dispersion medium containing, for example, water, ethanol, polyol (for example, glycerol, propylene glycol, and liquid polyethylene glycol, and the like), and suitable mixtures thereof. The proper fluidity can be maintained, for example, by the use of a coating such as lecithin, by the maintenance of the required particle size in the case of dispersion and by the use of surfactants. Prevention of the action of microorganisms can be achieved by various antibacterial and antifungal agents, for example, parabens, chlorobutanol, phenol, ascorbic acid, thimerosal, and the like. In many cases, isotonic agents, for example, sugars, polyalcohols such as mannitol, sorbitol, sodium chloride sometimes are included in the composition. Prolonged absorption of the injectable compositions can be brought about by including in the composition an agent which delays absorption, for example, aluminum monostearate and gelatin.

[0206] Sterile injectable solutions can be prepared by incorporating the active compound in the required amount in an appropriate solvent with one or a combination of ingredients enumerated above, as required, followed by filtered sterilization. Generally, dispersions are prepared by incorporating the active compound into a sterile vehicle which contains a basic dispersion medium and the required other ingredients from those enumerated above. In the case of sterile powders for the preparation of sterile injectable solutions, methods of preparation often utilized are vacuum drying and freeze-drying which yields a powder of the active ingredient plus any additional desired ingredient from a previously sterile-filtered solution thereof.

[0207] For administration by inhalation, the compounds are delivered in the form of an aerosol spray from pressured container or dispenser which contains a suitable propellant, e.g., a gas such as carbon dioxide, or a nebulizer.

[0208] Systemic administration can also be by transmucosal or transdermal means. For transmucosal or transdermal administration, penetrants appropriate to the barrier to be permeated are used in the formulation. Such penetrants are generally known in the art, and include, for example, for transmucosal administration, detergents, bile salts, and fusidic acid derivatives. Transmucosal administration can be accomplished through the use of nasal sprays or suppositories. For transdermal administration, the active compounds are formulated into ointments, salves, gels, or creams as generally known in the art. Molecules can also be prepared in the form of suppositories (e.g., with conventional suppository bases such as cocoa butter and other glycerides) or retention enemas for rectal delivery.

[0209] In one embodiment, active molecules are prepared with carriers that will protect the compound against rapid elimination from the body, such as a controlled release formulation, including implants and microencapsulated delivery systems. Biodegradable, biocompatible polymers can be used, such as ethylene vinyl acetate, polyanhydrides, polyglycolic acid, collagen, polyorthoesters, and polylactic acid. Methods for preparation of such formulations will be apparent to those skilled in the art. Materials can also be obtained commercially from Alza Corporation and Nova Pharmaceuticals, Inc. Liposomal suspensions (including liposomes targeted to infected cells with monoclonal antibodies to viral antigens) can also be used as pharmaceutically acceptable carriers. These can be prepared according to methods known to those skilled in the art, for example, as described in U.S. Pat. No. 4,522,811.

[0210] It is advantageous to formulate oral or parenteral compositions in dosage unit form for ease of administration and uniformity of dosage. Dosage unit form as used herein refers to physically discrete units suited as unitary dosages for the subject to be treated; each unit containing a predetermined quantity of active compound calculated to produce the desired therapeutic effect in association with the required pharmaceutical carrier.

[0211] Toxicity and therapeutic efficacy of such compounds can be determined by standard pharmaceutical procedures in cell cultures or experimental animals, e.g., for determining the LD₅₀ (the dose lethal to 50% of the population) and the ED₅₀ (the dose therapeutically effective in 50% of the population). The dose ratio between toxic and therapeutic effects is the therapeutic index and it can be expressed as the ratio LD₅₀/ED₅₀. Molecules which exhibit high therapeutic indices often are utilized. While molecules that exhibit toxic side effects may be used, care should be taken to design a delivery system that targets such compounds to the site of affected tissue in order to minimize potential damage to uninfected cells and, thereby, reduce side effects.

[0212] The data obtained from the cell culture assays and animal studies can be used in formulating a range of dosage for use in humans. The dosage of such molecules often lies within a range of circulating concentrations that include the ED₅₀ with little or no toxicity. The dosage may vary within this range depending upon the dosage form employed and the route of administration utilized. For any molecules used in the methods described herein, the therapeutically effective dose can be estimated initially from cell culture assays. A dose may be formulated in animal models to achieve a circulating plasma concentration range that includes the IC₅₀ (i.e., the concentration of the test compound which achieves a half-maximal inhibition of symptoms) as determined in cell culture. Such information can be used to more accurately determine useful doses in humans. Levels in plasma may be measured, for example, by high performance liquid chromatography.

[0213] As defined herein, a therapeutically effective amount of protein or polypeptide (i.e., an effective dosage) ranges from about 0.001 to 30 mg/kg body weight, sometimes about 0.01 to 25 mg/kg body weight, often about 0.1 to 20 mg/kg body weight, and more often about 1 to 10 mg/kg, 2 to 9 mg/kg, 3 to 8 mg/kg, 4 to 7 mg/kg, or 5 to 6 mg/kg body weight. The protein or polypeptide can be administered one time per week for between about 1 to 10 weeks, sometimes between 2 to 8 weeks, often between about 3 to 7 weeks, and more often for about 4, 5, or 6 weeks. The skilled artisan will appreciate that certain factors may influence the dosage and timing required to effectively treat a subject, including but not limited to the severity of the disease or disorder, previous treatments, the general health and/or age of the subject, and other diseases present. Moreover, treatment of a subject with a therapeutically effective amount of a protein, polypeptide, or antibody can include a single treatment, or sometimes can include a series of treatments.

[0214] With regard to polypeptide formulations, featured herein is a method for treating breast cancer in a subject, which comprises contacting one or more cells in the subject with a first DLG1, KIAA0783, DPF3 or CENPC1 polypeptide, where the subject comprises a second DLG1, KIAA0783, DPF3 or CENPC1 polypeptide having one or more polymorphic variations associated with cancer, and where the first polypeptide comprises fewer polymorphic variations associated with cancer than the second polypeptide. The first and second polypeptides are encoded by a nucleic acid which comprises a nucleotide sequence selected from the group consisting of the nucleotide sequence of SEQ ID NO: 1-8; a nucleotide sequence which encodes a polypeptide consisting of an amino acid sequence encoded by a nucleotide sequence of SEQ ID NO: 1-8; a nucleotide sequence which encodes a polypeptide that is 90% or more identical to an amino acid sequence encoded by a nucleotide sequence of SEQ ID NO: 1-8 and a nucleotide sequence 90% or more identical to a nucleotide sequence of SEQ ID NO: 1-8. The subject is often a human.

[0215] For antibodies, a dosage of 0.1 mg/kg of body weight (generally 10 mg/kg to 20 mg/kg) is often utilized. If the antibody is to act in the brain, a dosage of 50 mg/kg to 100 mg/kg is often appropriate. Generally, partially human antibodies and fully human antibodies have a longer half-life within the human body than other antibodies. Accordingly, lower dosages and less frequent administration is often possible. Modifications such as lipidation can be used to stabilize antibodies and to enhance uptake and tissue penetration (e.g., into the brain). A method for lipidation of antibodies is described by Cruikshank et al., J. Acquired Immune Deficiency Syndromes and Human Retrovirology 14:193 (1997).

[0216] Antibody conjugates can be used for modifying a given biological response, the drug moiety is not to be construed as limited to classical chemical therapeutic agents. For example, the drug moiety may be a protein or polypeptide possessing a desired biological activity. Such proteins may include, for example, a toxin such as abrin, ricin A, pseudomonas exotoxin, or diphtheria toxin; a polypeptide such as tumor necrosis factor, .alpha.-interferon, .beta.-interferon, nerve growth factor, platelet derived growth factor, tissue plasminogen activator; or, biological response modifiers such as, for example, lymphokines, interleukin-1 (“IL-1”), interleukin-2 (“IL-2”), interleukin-6 (“IL-6”), granulocyte macrophage colony stimulating factor (“GM-CSF”), granulocyte colony stimulating factor (“G-CSF”), or other growth factors. Alternatively, an antibody can be conjugated to a second antibody to form an antibody heteroconjugate as described by Segal in U.S. Pat. No. 4,676,980.

[0217] For compounds, exemplary doses include milligram or microgram amounts of the compound per kilogram of subject or sample weight, for example, about 1 microgram per kilogram to about 500 milligrams per kilogram, about 100 micrograms per kilogram to about 5 milligrams per kilogram, or about 1 microgram per kilogram to about 50 micrograms per kilogram. It is understood that appropriate doses of a small molecule depend upon the potency of the small molecule with respect to the expression or activity to be modulated. When one or more of these small molecules is to be administered to an animal (e.g., a human) in order to modulate expression or activity of a polypeptide or nucleic acid described herein, a physician, veterinarian, or researcher may, for example, prescribe a relatively low dose at first, subsequently increasing the dose until an appropriate response is obtained. In addition, it is understood that the specific dose level for any particular animal subject will depend upon a variety of factors including the activity of the specific compound employed, the age, body weight, general health, gender, and diet of the subject, the time of administration, the route of administration, the rate of excretion, any drug combination, and the degree of expression or activity to be modulated.

[0218] DLG1, KIAA0783, DPF3 or CENPC1 nucleic acid molecules can be inserted into vectors and used in gene therapy methods for treating breast cancer. Featured herein is a method for treating breast cancer in a subject, which comprises contacting one or more cells in the subject with a first DLG1, KIAA0783, DPF3 or CENPC1 nucleic acid, where genomic DNA in the subject comprises a second DLG1, KIAA0783, DPF3 or CENPC1 nucleic acid comprising one or more polymorphic variations associated with breast cancer, and where the first DLG1, KIAA0783, DPF3 or CENPC1 nucleic acid comprises fewer polymorphic variations associated with breast cancer. The first and second nucleic acids typically comprise a nucleotide sequence selected from the group consisting of the nucleotide sequence of SEQ ID NO: 1-8; a nucleotide sequence which encodes a polypeptide consisting of an amino acid sequence encoded by a nucleotide sequence of SEQ ID NO: 1-8; a nucleotide sequence that is 90% or more identical to the nucleotide sequence of SEQ ID NO: 1-8, and a nucleotide sequence which encodes a polypeptide that is 90% or more identical to an amino acid sequence encoded by a nucleotide sequence of SEQ ID NO: 1-8. The subject often is a human.

[0219] Gene therapy vectors can be delivered to a subject by, for example, intravenous injection, local administration (see U.S. Pat. No. 5,328,470) or by stereotactic injection (see e.g., Chen et al., (1994) Proc. Natl. Acad. Sci. USA 91:3054-3057). Pharmaceutical preparations of gene therapy vectors can include a gene therapy vector in an acceptable diluent, or can comprise a slow release matrix in which the gene delivery vehicle is imbedded. Alternatively, where the complete gene delivery vector can be produced intact from recombinant cells (e.g., retroviral vectors) the pharmaceutical preparation can include one or more cells which produce the gene delivery system. Examples of gene delivery vectors are described herein.

[0220] Pharmaceutical compositions can be included in a container, pack, or dispenser together with instructions for administration.

[0221] Pharmaceutical compositions of active ingredients can be administered by any of the paths described herein for therapeutic and prophylactic methods for treating breast cancer. With regard to both prophylactic and therapeutic methods of treatment, such treatments may be specifically tailored or modified, based on knowledge obtained from pharmacogenomic analyses described herein. As used herein, the term “treatment” is defined as the application or administration of a therapeutic agent to a patient, or application or administration of a therapeutic agent to an isolated tissue or cell line from a patient, who has a disease, a symptom of disease or a predisposition toward a disease, with the purpose to cure, heal, alleviate, relieve, alter, remedy, ameliorate, improve or affect the disease, the symptoms of disease or the predisposition toward disease. A therapeutic agent includes, but is not limited to, small molecules, peptides, antibodies, ribozymes and antisense oligonucleotides.

[0222] Administration of a prophylactic agent can occur prior to the manifestation of symptoms characteristic of the DLG1, KIAA0783, DPF3 or CENPC1 aberrance, such that a disease or disorder is prevented or, alternatively, delayed in its progression. Depending on the type of DLG1, KIAA0783, DPF3 or CENPC1 aberrance, for example, a DLG1, KIAA0783, DPF3 or CENPC1 molecule, DLG1, KIAA0783, DPF3 or CENPC1 agonist, or DLG1, KIAA0783, DPF3 or CENPC1 antagonist agent can be used for treating the subject. The appropriate agent can be determined based on screening assays described herein.

[0223] As discussed, successful treatment of DLG1, KIAA0783, DPF3 or CENPC1 disorders can be brought about by techniques that serve to inhibit the expression or activity of target gene products. For example, compounds (e.g., an agent identified using an assays described above) that exhibit negative modulatory activity can be used to prevent and/or treat breast cancer. Such molecules can include, but are not limited to peptides, phosphopeptides, small organic or inorganic molecules, or antibodies (including, for example, polyclonal, monoclonal, humanized, anti-idiotypic, chimeric or single chain antibodies, and FAb, F(ab′)2 and FAb expression library fragments, scFV molecules, and epitope-binding fragments thereof).

[0224] Further, antisense and ribozyme molecules that inhibit expression of the target gene can also be used to reduce the level of target gene expression, thus effectively reducing the level of target gene activity. Still further, triple helix molecules can be utilized in reducing the level of target gene activity. Antisense, ribozyme and triple helix molecules are discussed above.

[0225] It is possible that the use of antisense, ribozyme, and/or triple helix molecules to reduce or inhibit mutant gene expression can also reduce or inhibit the transcription (triple helix) and/or translation (antisense, ribozyme) of mRNA produced by normal target gene alleles, such that the concentration of normal target gene product present can be lower than is necessary for a normal phenotype. In such cases, nucleic acid molecules that encode and express target gene polypeptides exhibiting normal target gene activity can be introduced into cells via gene therapy method. Alternatively, in instances where the target gene encodes an extracellular polypeptide, normal target gene polypeptide often is co-administered into the cell or tissue to maintain the requisite level of cellular or tissue target gene activity.

[0226] Another method by which nucleic acid molecules may be utilized in treating or preventing a disease characterized by DLG1, KIAA0783, DPF3 or CENPC1 expression is through the use of aptamer molecules specific for DLG1, KIAA0783, DPF3 or CENPC1 polypeptide. Aptamers are nucleic acid molecules having a tertiary structure which permits them to specifically bind to polypeptide ligands (see, e.g., Osborne, et al., Curr. Opin. Chem. Biol. 1(1): 5-9 (1997); and Patel, D. J., Curr. Opin. Chem. Biol. June; 1(1): 32-46 (1997)). Since nucleic acid molecules may in many cases be more conveniently introduced into target cells than therapeutic polypeptide molecules may be, aptamers offer a method by which DLG1, KIAA0783, DPF3 or CENPC1 polypeptide activity may be specifically decreased without the introduction of drugs or other molecules which may have pluripotent effects.

[0227] Antibodies can be generated that are both specific for target gene product and that reduce target gene product activity. Such antibodies may, therefore, by administered in instances whereby negative modulatory techniques are appropriate for the treatment of DLG1, KIAA0783, DPF3 or CENPC1 disorders. For a description of antibodies, see the Antibody section above.

[0228] In circumstances where injection of an animal or a human subject with a DLG1, KIAA0783, DPF3 or CENPC1 polypeptide or epitope for stimulating antibody production is harmful to the subject, it is possible to generate an immune response against DLG1, KIAA0783, DPF3 or CENPC1 through the use of anti-idiotypic antibodies (see, for example, Herlyn, D., Ann. Med.; 31(1): 66-78 (1999); and Bhattacharya-Chatterjee & Foon, Cancer Treat. Res.; 94: 51-68 (1998)). If an anti-idiotypic antibody is introduced into a mammal or human subject, it should stimulate the production of anti-anti-idiotypic antibodies, which should be specific to the DLG1, KIAA0783, DPF3 or CENPC1 polypeptide. Vaccines directed to a disease characterized by DLG1, KIAA0783, DPF3 or CENPC1 expression may also be generated in this fashion.

[0229] In instances where the target antigen is intracellular and whole antibodies are used, internalizing antibodies may be utilized. Lipofectin or liposomes can be used to deliver the antibody or a fragment of the Fab region that binds to the target antigen into cells. Where fragments of the antibody are used, the smallest inhibitory fragment that binds to the target antigen often is utilized. For example, peptides having an amino acid sequence corresponding to the Fv region of the antibody can be used. Alternatively, single chain neutralizing antibodies that bind to intracellular target antigens can also be administered. Such single chain antibodies can be administered, for example, by expressing nucleotide sequences encoding single-chain antibodies within the target cell population (see e.g., Marasco et al., Proc. Natl. Acad. Sci. USA 90: 7889-7893 (1993)).

[0230] DLG1, KIAA0783, DPF3 or CENPC1 molecules and compounds that inhibit target gene expression, synthesis and/or activity can be administered to a patient at therapeutically effective doses to prevent, treat or ameliorate DLG1, KIAA0783, DPF3 or CENPC1 disorders. A therapeutically effective dose refers to that amount of the compound sufficient to result in amelioration of symptoms of the disorders.

[0231] Toxicity and therapeutic efficacy of such compounds can be determined by standard pharmaceutical procedures in cell cultures or experimental animals, e.g., for determining the LD₅₀ (the dose lethal to 50% of the population) and the ED₅₀ (the dose therapeutically effective in 50% of the population). The dose ratio between toxic and therapeutic effects is the therapeutic index and it can be expressed as the ratio LD₅₀/ED₅₀. Compounds that exhibit large therapeutic indices often are utilized. While compounds that exhibit toxic side effects can be used, care should be taken to design a delivery system that targets such compounds to the site of affected tissue in order to minimize potential damage to uninfected cells and, thereby, reduce side effects.

[0232] Data obtained from cell culture assays and animal studies can be used in formulating a range of dosage for use in humans. The dosage of such compounds often lies within a range of circulating concentrations that include the ED₅₀ with little or no toxicity. The dosage can vary within this range depending upon the dosage form employed and the route of administration utilized. For any compound used in a method described herein, the therapeutically effective dose can be estimated initially from cell culture assays. A dose can be formulated in animal models to achieve a circulating plasma concentration range that includes the IC₅₀ (i.e., the concentration of the test compound that achieves a half-maximal inhibition of symptoms) as determined in cell culture. Such information can be used to more accurately determine useful doses in humans. Levels in plasma can be measured, for example, by high performance liquid chromatography.

[0233] Another example of effective dose determination for an individual is the ability to directly assay levels of “free” and “bound” compound in the serum of the test subject. Such assays may utilize antibody mimics and/or “biosensors” that have been created through molecular imprinting techniques. The compound which is able to modulate DLG1, KIAA0783, DPF3 or CENPC1 activity is used as a template, or “imprinting molecule”, to spatially organize polymerizable monomers prior to their polymerization with catalytic reagents. The subsequent removal of the imprinted molecule leaves a polymer matrix which contains a repeated “negative image” of the compound and is able to selectively rebind the molecule under biological assay conditions. A detailed review of this technique can be seen in Ansell et al., Current Opinion in Biotechnology 7: 89-94 (1996) and in Shea, Trends in Polymer Science 2: 166-173 (1994). Such “imprinted” affinity matrixes are amenable to ligand-binding assays, whereby the immobilized monoclonal antibody component is replaced by an appropriately imprinted matrix. An example of the use of such matrixes in this way can be seen in Vlatakis, et al., Nature 361: 645-647 (1993). Through the use of isotope-labeling, the “free” concentration of compound which modulates the expression or activity of DLG1, KIAA0783, DPF3 or CENPC1 can be readily monitored and used in calculations of IC₅₀. Such “imprinted” affinity matrixes can also be designed to include fluorescent groups whose photon-emitting properties measurably change upon local and selective binding of target compound. These changes can be readily assayed in real time using appropriate fiberoptic devices, in turn allowing the dose in a test subject to be quickly optimized based on its individual IC₅₀. A rudimentary example of such a “biosensor” is discussed in Kriz et al., Analytical Chemistry 67: 2142-2144 (1995).

[0234] Provided herein are methods of modulating DLG1, KIAA0783, DPF3 or CENPC1 expression or activity for therapeutic purposes. Accordingly, in an exemplary embodiment, the modulatory method involves contacting a cell with a DLG1, KIAA0783, DPF3 or CENPC1 or agent that modulates one or more of the activities of DLG1, KIAA0783, DPF3 or CENPC1 polypeptide activity associated with the cell. An agent that modulates DLG1, KIAA0783, DPF3 or CENPC1 polypeptide activity can be an agent as described herein, such as a nucleic acid or a polypeptide, a naturally-occurring target molecule of a DLG1, KIAA0783, DPF3 or CENPC1 polypeptide (e.g., a DLG1, KIAA0783, DPF3 or CENPC1 substrate or receptor), a DLG1, KIAA0783, DPF3 or CENPC1 antibody, a DLG1, KIAA0783, DPF3 or CENPC1 agonist or antagonist, a peptidomimetic of a DLG1, KIAA0783, DPF3 or CENPC1 agonist or antagonist, or other small molecule.

[0235] In one embodiment, the agent stimulates one or more DLG1, KIAA0783, DPF3 or CENPC1 activities. Examples of such stimulatory agents include active DLG1, KIAA0783, DPF3 or CENPC1 polypeptide and a nucleic acid molecule encoding DLG1, KIAA0783, DPF3 or CENPC1. In another embodiment, the agent inhibits one or more DLG1, KIAA0783, DPF3 or CENPC1 activities. Examples of such inhibitory agents include antisense DLG1, KIAA0783, DPF3 or CENPC1 nucleic acid molecules, anti-DLG1, KIAA0783, DPF3 or CENPC1 antibodies, and DLG1, KIAA0783, DPF3 or CENPC1 inhibitors. These modulatory methods can be performed in vitro (e.g., by culturing the cell with the agent) or, alternatively, in vivo (e.g., by administering the agent to a subject). As such, provided are methods of treating an individual afflicted with a disease or disorder characterized by aberrant or unwanted expression or activity of a DLG1, KIAA0783, DPF3 or CENPC1 polypeptide or nucleic acid molecule. In one embodiment, the method involves administering an agent (e.g., an agent identified by a screening assay described herein), or combination of agents that modulates (e.g., upregulates or downregulates) DLG1, KIAA0783, DPF3 or CENPC1 expression or activity. In a preferred embodiment, the method involves administering an agent (e.g., an agent identified by a screening assay described herein), or combination of agents that inhibits DLG1, KIAA0783, DPF3 or CENPC1 expression or activity. In another embodiment, the method involves administering a DLG1, KIAA0783, DPF3 or CENPC1 polypeptide or nucleic acid molecule as therapy to compensate for reduced, aberrant, or unwanted DLG1, KIAA0783, DPF3 or CENPC1 expression or activity.

[0236] Stimulation of DLG1, KIAA0783, DPF3 or CENPC1 activity is desirable in situations in which DLG1, KIAA0783, DPF3 or CENPC1 is abnormally downregulated and/or in which increased DLG1, KIAA0783, DPF3 or CENPC1 activity is likely to have a beneficial effect. For example, stimulation of DLG1, KIAA0783, DPF3 or CENPC1 activity is desirable in situations in which a DLG1, KIAA0783, DPF3 or CENPC1 is downregulated and/or in which increased DLG1, KIAA0783, DPF3 or CENPC1 activity is likely to have a beneficial effect. Likewise, inhibition of DLG1, KIAA0783, DPF3 or CENPC1 activity is desirable in situations in which DLG1, KIAA0783, DPF3 or CENPC1 is abnormally upregulated and/or in which decreased DLG1, KIAA0783, DPF3 or CENPC1 activity is likely to have a beneficial effect.

[0237] Methods of Treatment

[0238] In another aspect, provided are methods for identifying a risk of cancer in an individual as described herein and, if a genetic predisposition is identified, treating that individual to delay or reduce or prevent the development of cancer. Such a procedure can be used to treat breast cancer. Optionally, treating an individual for cancer may include inhibiting cellular proliferation, inhibiting metastasis, inhibiting invasion, or preventing tumor formation or growth as defined herein. Suitable treatments to prevent or reduce or delay breast cancer focus on inhibiting additional cellular proliferation, inhibiting metastasis, inhibiting invasion, and preventing further tumor formation or growth. Treatment usually includes surgery followed by radiation therapy. Surgery may be a lumpectomy or a mastectomy (e.g., total, simple or radical). Even if the doctor removes all of the cancer that can be seen at the time of surgery, the patient may be given radiation therapy, chemotherapy, or hormone therapy after surgery to try to kill any cancer cells that may be left. Radiation therapy is the use of x-rays or other types of radiation to kill cancer cells and shrink tumors. Radiation therapy may use external radiation (using a machine outside the body) or internal radiation. Chemotherapy is the use of drugs to kill cancer cells. Chemotherapy may be taken by mouth, or it may be put into the body by inserting a needle into a vein or muscle. Hormone therapy often focuses on estrogen and progesterone, which are hormones that affect the way some cancers grow. If tests show that the cancer cells have estrogen and progesterone receptors (molecules found in some cancer cells to which estrogen and progesterone will attach), hormone therapy is used to block the way these hormones help the cancer grow. Hormone therapy with tamoxifen is often given to patients with early stages of breast cancer and those with metastatic breast cancer. Other types of treatment being tested in clinical trials include sentinel lymph node biopsy followed by surgery and high-dose chemotherapy with bone marrow transplantation and peripheral blood stem cell transplantation. Any preventative/therapeutic treatment known in the art may be prescribed and/or administered, including, for example, surgery, chemotherapy and/or radiation treatment, and any of the treatments may be used in combination with one another to treat or prevent breast cancer (e.g., surgery followed by radiation therapy).

[0239] Also provided are methods of preventing or treating cancer comprising providing an individual in need of such treatment with a DLG1, KIAA0783, DPF3 or CENPC1 inhibitor that reduces or inhibits the overexpression of mutant DLG1, KIAA0783, DPF3 or CENPC1 (e.g., a DLG1, KIAA0783, DPF3 or CENPC1 polynucleotide with an allele that is associated with cancer). Included herein are methods of reducing or blocking the expression of DLG1, KIAA0783, DPF3 or CENPC1 comprising providing or administering to individuals in need of reducing or blocking the expression of DLG1, KIAA0783, DPF3 or CENPC1 a pharmaceutical or physiologically acceptable composition comprising a molecule capable of inhibiting expression of DLG1, KIAA0783, DPF3 or CENPC1, e.g., a siRNA molecule. Also included herein are methods of reducing or blocking the expression of secondary regulatory genes regulated by DLG1, KIAA0783, DPF3 or CENPC1 that play a role in oncogenesis which comprises introducing competitive inhibitors that target DLG1, KIAA0783, DPF3 or CENPC1's effect on these regulatory genes or that block the binding of positive factors necessary for the expression of these regulatory genes.

[0240] The examples set forth below are intended to illustrate but not limit the invention.

### EXAMPLES

[0241] In the following studies a group of subjects were selected according to specific parameters relating to breast cancer. Nucleic acid samples obtained from individuals in the study group were subjected to genetic analysis, which identified associations between breast cancer and certain polymorphic regions in the DLG1, KIAA0783, DPF3 and CENPC1 genes (herein referred to as “target genes”, “target nucleotides”, “target polypeptides” or simply “targets”). Methods are described for producing DLG1, KIAA0783, DPF3 and CENPC1 polypeptides and polypeptide variants in vitro or in vivo. DLG1, KIAA0783, DPF3 and CENPC1 nucleic acids or polypeptides and variants thereof are utilized for screening test molecules for those that interact with DLG1, KIAA0783, DPF3 and CENPC1 molecules. Test molecules identified as interactors with DLG1, KIAA0783, DPF3 and CENPC1 molecules and variants are further screened in vivo to determine whether they treat breast cancer.

### Example 1

### Samples and Pooling Strategies

Sample Selection

[0242] Blood samples were collected from individuals diagnosed with breast cancer, which were referred to as case samples. Also, blood samples were collected from individuals not diagnosed with breast cancer as gender and age-matched controls. All of the samples were of German/German descent. A database was created that listed all phenotypic trait information gathered from individuals for each case and control sample. Genomic DNA was extracted from each of the blood samples for genetic analyses.

[0243] DNA Extraction from Blood Samples

[0244] Six to ten milliliters of whole blood was transferred to a 50 ml tube containing 27 ml of red cell lysis solution (RCL). The tube was inverted until the contents were mixed. Each tube was incubated for 10 minutes at room temperature and inverted once during the incubation. The tubes were then centrifuged for 20 minutes at 3000×g and the supernatant was carefully poured off. 100-200 μl of residual liquid was left in the tube and was pipetted repeatedly to resuspend the pellet in the residual supernatant. White cell lysis solution (WCL) was added to the tube and pipetted repeatedly until completely mixed. While no incubation was normally required, the solution was incubated at 37° C. or room temperature if cell clumps were visible after mixing until the solution was homogeneous. 2 ml of protein precipitation was added to the cell lysate. The mixtures were vortexed vigorously at high speed for 20 sec to mix the protein precipitation solution uniformly with the cell lysate, and then centrifuged for 10 minutes at 3000×g. The supernatant containing the DNA was then poured into a clean 15 ml tube, which contained 7 ml of 100% isopropanol. The samples were mixed by inverting the tubes gently until white threads of DNA were visible. Samples were centrifuged for 3 minutes at 2000×g and the DNA was visible as a small white pellet. The supernatant was decanted and 5 ml of 70% ethanol was added to each tube. Each tube was inverted several times to wash the DNA pellet, and then centrifuged for 1 minute at 2000×g. The ethanol was decanted and each tube was drained on clean absorbent paper. The DNA was dried in the tube by inversion for 10 minutes, and then 1000 μl of 1×TE was added. The size of each sample was estimated, and less TE buffer was added during the following DNA hydration step if the sample was smaller. The DNA was allowed to rehydrate overnight at room temperature, and DNA samples were stored at 2-8° C.

[0245] DNA was quantified by placing samples on a hematology mixer for at least 1 hour. DNA was serially diluted (typically 1:80, 1:160, 1:320, and 1:640 dilutions) so that it would be within the measurable range of standards. 125 μl of diluted DNA was transferred to a clear U-bottom microtitre plate, and 125 μl of 1×TE buffer was transferred into each well using a multichannel pipette. The DNA and 1×TE were mixed by repeated pipetting at least 15 times, and then the plates were sealed. 50 μl of diluted DNA was added to wells A5-H12 of a black flat bottom microtitre plate. Standards were inverted six times to mix them, and then 50 μl of 1×TE buffer was pipetted into well Al, 1000 ng/ml of standard was pipetted into well A2, 500 ng/ml of standard was pipetted into well A3, and 250 ng/ml of standard was pipetted into well A4. PicoGreen (Molecular Probes, Eugene, Oreg.) was thawed and freshly diluted 1:200 according to the number of plates that were being measured. PicoGreen was vortexed and then 50 μl was pipetted into all wells of the black plate with the diluted DNA. DNA and PicoGreen were mixed by pipetting repeatedly at least 10 times with the multichannel pipette. The plate was placed into a Fluoroskan Ascent Machine (microplate fluorometer produced by Labsystems) and the samples were allowed to incubate for 3 minutes before the machine was run using filter pairs 485 nm excitation and 538 nm emission wavelengths. Samples having measured DNA concentrations of greater than 450 ng/μl were re-measured for conformation. Samples having measured DNA concentrations of 20 ng/μl or less were re-measured for confirmation.

[0246] Pooling Strategies

[0247] Samples were placed into one of two groups based on disease status. The two groups were female case groups and female control groups. A select set of samples from each group were utilized to generate pools, and one pool was created for each group. Each individual sample in a pool was represented by an equal amount of genomic DNA. For example, where 25 ng of genomic DNA was utilized in each PCR reaction and there were 200 individuals in each pool, each individual would provide 125 pg of genomic DNA. Inclusion or exclusion of samples for a pool was based upon the following criteria: the sample was derived from an individual characterized as Caucasian; the sample was derived from an individual of German paternal and maternal descent; the database included relevant phenotype information for the individual; case samples were derived from individuals diagnosed with breast cancer; control samples were derived from individuals free of cancer and no family history of breast cancer; and sufficient genomic DNA was extracted from each blood sample for all allelotyping and genotyping reactions performed during the study. Phenotype information included pre- or post-menopausal, familial predisposition, country or origin of mother and father, diagnosis with breast cancer (date of primary diagnosis, age of individual as of primary diagnosis, grade or stage of development, occurrence of metastases, e.g., lymph node metastases, organ metastases), condition of body tissue (skin tissue, breast tissue, ovary tissue, peritoneum tissue and myometrium), method of treatment (surgery, chemotherapy, hormone therapy, radiation therapy). Samples that met these criteria were added to appropriate pools based on gender and disease status.

[0248] The selection process yielded the pools set forth in Table 1, which were used in the studies that follow:

TABLE 1

| | Female CASE | Female CONTROL |
|---|---|---|
| Pool size | 272 | 276 |
| (Number) | | |
| Pool Criteria | case | control |
| (ex: case/control) | | |
| Mean Age | 59.6 | 55.4 |
| (ex: years) | | |

### Example 2

### Association of Polymorphic Variants with Breast cancer

[0249] A whole-genome screen was performed to identify particular SNPs associated with occurrence of breast cancer. As described in Example 1, two sets of samples were utilized, which included samples from female individuals having breast cancer (breast cancer cases) and samples from female individuals not having cancer (female controls). The initial screen of each pool was performed in an allelotyping study, in which certain samples in each group were pooled. By pooling DNA from each group, an allele frequency for each SNP in each group was calculated. These allele frequencies were then compared to one another. Particular SNPs were considered as being associated with breast cancer when allele frequency differences calculated between case and control pools were statistically significant. SNP disease association results obtained from the allelotyping study were then validated by genotyping each associated SNP across all samples from each pool. The results of the genotyping were then analyzed, allele frequencies for each group were calculated from the individual genotyping results, and a p-value was calculated to determine whether the case and control groups had statistically significantly differences in allele frequencies for a particular SNP. When the genotyping results agreed with the original allelotyping results, the SNP disease association was considered validated at the genetic level.

[0250] SNP Panel Used for Genetic Analyses

[0251] A whole-genome SNP screen began with an initial screen of approximately 25,000 SNPs over each set of disease and control samples using a pooling approach. The pools studied in the screen are described in Example 1. The SNPs analyzed in this study were part of a set of 25,488 SNPs confirmed as being statistically polymorphic as each is characterized as having a minor allele frequency of greater than 10%. The SNPs in the set reside in genes or in close proximity to genes, and many reside in gene exons. Specifically, SNPs in the set are located in exons, introns, and within 5,000 base-pairs upstream of a transcription start site of a gene. In addition, SNPs were selected according to the following criteria: they are located in ESTs; they are located in Locuslink or Ensemble genes; and they are located in Genomatix promoter predictions. SNPs in the set also were selected on the basis of even spacing across the genome, as depicted in Table 2.

[0252] A case-control study design using a whole genome association strategy involving approximately 28,000 single nucleotide polymorphisms (SNPs) was employed. Approximately 25,000 SNPs were evenly spaced in gene-based regions of the human genome with a median inter-marker distance of about 40,000 base pairs. Additionally, approximately 3,000 SNPs causing amino acid substitutions in genes described in the literature as candidates for various diseases were used. The case-control study samples were of female German origin (German paternal and maternal descent) 548 individuals were equally distributed in two groups (female controls and female cases). The whole genome association approach was first conducted on 2 DNA pools representing the 2 groups. Significant markers were confirmed by individual genotyping.

TABLE 2

| General Statistics | | | Spacing Statistics | | |
|---|---|---|---|---|---|
| Total # of SNPs | 25,488 | | Median | 37,058 | bp |
| # of Exonic SNPs | >4,335 | (17%) | Minimum* | 1,000 | bp |
| # SNPs with | 20,776 | (81%) | Maximum* | 3,000,000 | bp |
| refSNP ID | | | | | |
| Gene Coverage | >10,000 | | Mean | 122,412 | bp |

| | | | | |
|---|---|---|---|---|
| Chromosome | All | Std Deviation | 373,325 | bp |
| Coverage | | | | |

*Excludes outliers

Allelotyping and Genotyping Results

[0253] The genetic studies summarized above and described in more detail below identified allelic variants associated with breast cancer. The allelic variants identified from the SNP panel described in Table 2 are summarized below in Table 3.

TABLE 3

| | Chromo- | | | | | | |
|---|---|---|---|---|---|---|---|
| SNP | some | Position in | Contig | Contig | Sequence | Sequence | Allelic |
| Reference | Position | FIGS. 1-4 | Identification | Position | Identification | Position | Variability |
| rs1949471 | 198272877 | 39977 | NT_029928 | 1484976 | NM_004087 | Exonic | T/C |
| | | | | | | (R278Q) | |
| rs220097 | 10793860 | 49860 | NT_007819 | 10345196 | NM_014660 | intragenic | T/C |
| rs1990440 | 71267195 | 40095 | NT_026437 | 53197195 | NM_012074 | intragenic | G/C |
| rs355510 | 68321769 | 46769 | NT_022778 | 8587277 | NM_001812 | intragenic | G/A |

[0254] Table 3 includes information pertaining to the incident polymorphic variant associated with breast cancer identified herein. Public information pertaining to the polymorphism and the genomic sequence that includes the polymorphism are indicated. The genomic sequences identified in Table 3 may be accessed at the http address www.ncbi.nih.gov/entrez/query.fcgi, for example, by using the publicly available SNP reference number (e.g., rs1949471). The chromosome position refers to the position of the SNP within NCBI's Genome Build 33, which may be accessed at the following http address: www.ncbi.nlm.nih.gov/mapview/map_search.cgi?chr=hum_chr.inf&query=. The “Contig Position” provided in Table 3 corresponds to a nucleotide position set forth in the contig sequence, and designates the polymorphic site corresponding to the SNP reference number. The sequence containing the polymorphisms also may be referenced by the “Sequence Identification” set forth in Table 3. The “Sequence Identification” corresponds to cDNA sequence that encodes associated target polypeptides (e.g., DLG1) of the invention. The position of the SNP within the cDNA sequence is provided in the “Sequence Position” column of Table 3. Also, the allelic variation at the polymorphic site and the allelic variant identified as associated with breast cancer is specified in Table 3. All nucleotide sequences referenced and accessed by the parameters set forth in Table 3 are incorporated herein by reference. rs220097 also is known rs286246.

[0255] Assay for Verifying, Allelotyping, and Genotyping SNPs

[0256] A MassARRAY™ system (Sequenom, Inc.) was utilized to perform SNP genotyping in a high-throughput fashion. This genotyping platform was complemented by a homogeneous, single-tube assay method (hME™ or homogeneous MassEXTEND™ (Sequenom, Inc.)) in which two genotyping primers anneal to and amplify a genomic target surrounding a polymorphic site of interest. A third primer (the MassEXTEND™ primer), which is complementary to the amplified target up to but not including the polymorphism, was then enzymatically extended one or a few bases through the polymorphic site and then terminated.

[0257] For each polymorphism, SpectroDESIGNER™ software (Sequenom, Inc.) was used to generate a set of PCR primers and a MassEXTEND™ primer was used to genotype the polymorphism. Table 4 shows PCR primers and Table 5 shows extension primers used for analyzing polymorphisms. The initial PCR amplification reaction was performed in a 5 μl total volume containing 1×PCR buffer with 1.5 mM MgCl₂ (Qiagen), 200 μM each of dATP, dGTP, dCTP, dTTP (Gibco-BRL), 2.5 ng of genomic DNA, 0.1 units of HotStar DNA polymerase (Qiagen), and 200 nM each of forward and reverse PCR primers specific for the polymorphic region of interest.

TABLE 4

PCR Primers

| Refer- | | |
|---|---|---|
| ence | Forward | Reverse |
| SNP ID | PCR primer | PCR primer |
| rs- | ACGTTGGATGGCTTCAACTG | ACGTTGGATGTTTCTCAGGG |
| 1949471 | CTTTGCTATG | TCAATGACTG |
| rs- | GCAAACGTGCACATTTGCAC | TTCCTGGGAATGGATTTCAG |
| 220097 | | |
| rs- | CCAGGGTGTGTTCTAATACG | AAGTCACTAACCCCACACAC |
| 1990440 | | |
| rs- | TTCTGAGATGATCCTGATGG | CCCTCCTTTTAACCTTTTAGG |
| 355510 | | |

[0258] Samples were incubated at 95° C. for 15 minutes, followed by 45 cycles of 95° C. for 20 seconds, 56° C. for 30 seconds, and 72° C. for 1 minute, finishing with a 3 minute final extension at 72° C. Following amplification, shrimp alkaline phosphatase (SAP) (0.3 units in a 2 μl volume) (Amersham Pharmacia) was added to each reaction (total reaction volume was 7 μl) to remove any residual dNTPs that were not consumed in the PCR step. Samples were incubated for 20 minutes at 37° C., followed by 5 minutes at 85° C. to denature the SAP.

[0259] Once the SAP reaction was complete, a primer extension reaction was initiated by adding a polymorphism-specific MassEXTEND™ primer cocktail to each sample. Each MassEXTEND™ cocktail included a specific combination of dideoxynucleotides (ddNTPs) and deoxynucleotides (dNTPs) used to distinguish polymorphic alleles from one another. In Table 5, ddNTPs are shown and the fourth nucleotide not shown is the dNTP.

TABLE 5

Extend Primers

| Reference | Extend | Term |
|---|---|---|
| SNP ID | Probe | Mix |
| rs1949471 | CAGGGTCAATGACTGTATATTAC | ACT |
| rs220097 | ACAGAGTITTAAACCTCCTACA | ACT |
| rs1990440 | CGTCAGCAAATGTGTACCGA | ACT |
| rs355510 | ATGGTTTTCTTTCTTGTCCTTC | ACG |

[0260] The MassEXTEND™ reaction was performed in a total volume of 9 μl, with the addition of 1×ThermoSequenase buffer, 0.576 units of ThermoSequenase (Amersham Pharmacia), 600 nM MassEXTEND™ primer, 2 mM of ddATP and/or ddCTP and/or ddGTP and/or ddTTP, and 2 mM of dATP or dCTP or dGTP or dTTP. The deoxy nucleotide (dNTP) used in the assay normally was complementary to the nucleotide at the polymorphic site in the amplicon. Samples were incubated at 94° C. for 2 minutes, followed by 55 cycles of 5 seconds at 94° C., 5 seconds at 52° C., and 5 seconds at 72° C.

[0261] Following incubation, samples were desalted by adding 16 μl of water (total reaction volume was 25 μl), 3 mg of SpectroCLEAN™ sample cleaning beads (Sequenom, Inc.) and allowed to incubate for 3 minutes with rotation. Samples were then robotically dispensed using a piezoelectric dispensing device (SpectroJET™ (Sequenom, Inc.)) onto either 96-spot or 384-spot silicon chips containing a matrix that crystallized each sample (SpectroCHIP® (Sequenom, Inc.)). Subsequently, MALDI-TOF mass spectrometry (Biflex and Autoflex MALDI-TOF mass spectrometers (Bruker Daltonics) can be used) and SpectroTYPER RT™ software (Sequenom, Inc.) were used to analyze and interpret the SNP genotype for each sample.

[0262] Genetic Analysis

[0263] Variations identified in the target genes are provided in their respective genomic sequences (see FIGS. 1-5) Minor allelic frequencies for these polymorphisms was verified as being 10% or greater by determining the allelic frequencies using the extension assay described above in a group of samples isolated from 92 individuals originating from the state of Utah in the United States, Venezuela and France (Coriell cell repositories).

[0264] Genotyping results are shown for female pools in Table 6A and 6B. Table 6A shows the orginal genotyping results and Table 6B shows the genotyped results re-analyzed to remove duplicate individuals from the cases and controls (i.e., individuals who were erroneously included more than once as either cases or controls). Therefore, Table 6B represents a more accurate measure of the allele frequencies for this particular SNP. In the subsequent tables, “AF” refers to allelic frequency; and “F case” and “F control” refer to female case and female control groups, respectively.

TABLE 6A

| | | | | | Breast |
|---|---|---|---|---|---|
| Reference | AF | AF | | Odds | Cancer |
| SNP ID | F case | F control | p-value | Ratio | Assoc. Allele |
| rs1949471 | T = 0.186 | T = 0.112 | 0.0005 | 0.54 | T |
| | C = 0.814 | C = 0.890 | | | |
| rs220097 | T = 0.721 | T = 0.626 | 0.0014 | 0.66 | T |
| | C = 0.279 | C = 0.374 | | | |
| rs1990440 | C = 0.876 | C = 0.926 | 0.0027 | 0.65 | G |
| | G = 0.124 | G = 0.074 | | | |
| rs355510 | A = 0.545 | A = 0.616 | 0.0173 | 0.75 | G |
| | G = 0.455 | G = 0.384 | | | |

[0265] TABLE 6B

| | | | | | Breast |
|---|---|---|---|---|---|
| Reference | AF | AF | | Odds | Cancer |
| SNP ID | F case | F control | p-value | Ratio | Assoc. Allele |
| rs1949471 | T = 0.182 | T = 0.108 | 0.0009 | 0.54 | T |
| | C = 0.818 | C = 0.892 | | | |
| rs220097 | T = 0.709 | T = 0.624 | 0.0045 | 0.68 | T |
| | C = 0.291 | C = 0.376 | | | |
| rs1990440 | C = 0.879 | C = 0.915 | 0.0692 | 0.67 | G |
| | G = 0.121 | G = 0.085 | | | |
| rs355510 | A = 0.539 | A = 0.617 | 0.0123 | 0.73 | G |
| | G = 0.461 | G = 0.383 | | | |

[0266] The single marker alleles set forth in Table 3 were considered validated, since the genotyping data for the females, males or both pools were significantly associated with breast cancer, and because the genotyping results agreed with the original allelotyping results. Particularly significant associations with breast cancer are indicated by a calculated p-value of less than 0.05 for genotype results, which are set forth in bold text. Tables 6A and 6B show the disease associated allele in column 6. In the case of rs1949471, this SNP is an exonic SNP that codes for a R278Q amino acid change in the DLG1 gene. The thymine allele codes for glutamine (Q); therefore, a glutamine is associated with an increased risk of breast cancer.

[0267] Odds ratio results are shown in Tables 6A and 6B. An odds ratio is an unbiased estimate of relative risk which can be obtained from most case-control studies. Relative risk (RR) is an estimate of the likelihood of disease in the exposed group (susceptibility allele or genotype carriers) compared to the unexposed group (not carriers). It can be calculated by the following equation:
[0268] RR=IA/Ia
   IA is the incidence of disease in the A carriers and Ia is the incidence of disease in the non-carriers.

[0269] RR>1 indicates the A allele increases disease susceptibility.

[0270] RR<1 indicates the a allele increases disease susceptibility.

[0271] For example, RR=1.5 indicates that carriers of the A allele have 1.5 times the risk of disease than non-carriers, i.e., 50% more likely to get the disease.

[0272] Case-control studies do not allow the direct estimation of IA and Ia, therefore relative risk cannot be directly estimated. However, the odds ratio (OR) can be calculated using the following equation:
[0273] OR=(nDAnda)/(ndAnDa)=pDA(1−pdA)/pdA(1−pDA), or
[0274] OR=((case f)/(1−case f))/((control f)/(1−control f)), where f=susceptibility allele frequency.

[0275] An odds ratio can be interpreted in the same way a relative risk is interpreted and can be directly estimated using the data from case-control studies, i.e., case and control allele frequencies. The higher the odds ratio value, the larger the effect that particular allele has on the development of breast cancer. Possessing an allele associated with a relatively high odds ratio translates to having a higher risk of developing or having breast cancer.

### Example 3

### DLG1 Region Proximal SNPs

[0276] It has been discovered that a polymorphic variation (rs1949471) in a region that encodes the discs, large homolog 1 (Drosophila) (DLG1) gene is associated with the occurrence of breast cancer (see Examples 1 and 2). Subsequently, SNPs proximal to the incident SNP (rs1949471) were identified and allelotyped in breast cancer sample sets and control sample sets as described in Examples 1 and 2. Approximately twenty-one allelic variants located within the DLG1 region were identified and allelotyped. The polymorphic variants are set forth in Table 7. The chromosome position provided in column four of Table 7 is based on Genome “Build 33” of NCBI's GenBank.

TABLE 7

| dbSNP | | Chromosome | Position in | Allele |
|---|---|---|---|---|
| rs# | Chromosome | Position | | Variants |
| 2341225 | 3 | 198233033 | 133 | T/C |
| 3856760 | 3 | 198240838 | 7938 | T/C |
| 2195027 | 3 | 198241773 | 8873 | G/A |
| 1356612 | 3 | 198246121 | 13221 | C/T |
| 3773845 | 3 | 198250188 | 17288 | T/C |
| 2098941 | 3 | 198258632 | 25732 | G/A |
| 890491 | 3 | 198259823 | 26923 | C/G |
| 1949471 | 3 | 198272877 | 39977 | C/T |
| 3773851 | 3 | 198274184 | 41284 | T/A |
| 3773852 | 3 | 198274310 | 41410 | A/C |
| 3773853 | 3 | 198274377 | 41477 | C/T |
| 1195059 | 3 | 198274414 | 41514 | G/A |
| 3773855 | 3 | 198275506 | 42606 | G/A |
| 3821713 | 3 | 198275642 | 42742 | A/C |
| 604005 | 3 | 198292415 | 59515 | G/A |
| DLG1_SNP | 3 | 198292708 | 59808 | T/C |
| 2879969 | 3 | 198293165 | 60265 | C/G |
| 958902 | 3 | 198300052 | 67152 | T/C |
| 1839742 | 3 | 198301232 | 68332 | T/C |
| 1868890 | 3 | 198304028 | 71128 | T/C |
| 1868891 | 3 | 198309327 | 76427 | G/A |

Assay for Verifying and Allelotyping SNPs

[0277] The methods used to verify and allelotype the proximal SNPs of Table 7 are the same methods described in Examples 1 and 2 herein. The PCR primers and extend primers used in these assays are provided in Table 8 and Table 9, respectively.

TABLE 8

| dbSNP | Forward | Reverse |
|---|---|---|
| rs# | PCR primer | PCR primer |
| 604005 | ACGTTGGATGTGTCTCGCTTTTAGCCTGTG | ACGTTGGATGCAGACAGACATACAGAAGGG |
| 890491 | ACGTTGGATGGCAGAACCATGGAGAAAAGC | ACGTTGGATGGGCAAGAGTAAGGCACTATC |
| 958902 | ACGTTGGATGGCCACTGAATTGTACATTAAC | ACGTTGGATGATTGGAGTCCCGAGCTAAAC |
| 1195059 | ACGTTGGATGCCTGTTTTCATTTAGACTCC | ACGTTGGATGTGCTCACAAAGATTTAAACC |
| 1356612 | ACGTTGGATGTTGAACAGCTCAGCTGAAAG | ACGTTGGATGAGATACATGTCTTGTCTGGG |
| 1839742 | ACGTTGGATGTCTGAGGTCAGGAGTTTGAG | ACGTTGGATGGCCACCATGTCCAGCTAATT |
| 1868890 | ACGTTGGATGAGTGAGGAAGGCCTATTAAC | ACGTTGGATGATACCTGAGTCGAACTCTTG |
| 1868891 | ACGTrGGATGTTA1TGCTCTTGAACGTGGC | ACGTTGGATGTCTGAGAAAAAGAATTGGGG |
| 1949471 | ACGTTGGATGTTTCTCAGGGTCAATGACTG | ACGTTGGATGAGACCCTGCTTCTTTCAACG |
| 2098941 | ACGTTGGATGATTAGCTGGGCATGCTATCC | ACGTTGGATGTGTAGCCTTGAATTCCTGGG |
| 2195027 | ACGTTGGATGGGCGCTAAATAATGCGCCAC | ACGTTGGATGCTGACCTCGTGATCTGCCTG |
| 2341225 | ACGTTGGATGGGCGGGTGGGAAGACTCTAA | ACGTTGGATGTCTTTCACTGTATTCAGATC |
| 2879969 | ACGTTGGATGCTCCATTTCAAAAAAAAAAA | ACGTTGGATGCCTTAGAGGTATGTCCAGAG |
| 3773845 | ACGTTGGATGACACAAGTAACAAACTTGAG | ACGTTGGATGGTGCTTGAAGAAATTATGTG |
| 3773851 | ACGTTGGATGTAAGATACGGAGGATAGAGG | ACGTTGGATGGCATATAGTCTTTGTGGTGTG |
| 3773852 | ACGTTGGATGGTGAGTGTACUAAATAAGTT | ACGTTGGATGGTTTCCCTTTGTGTTTTCAG |
| 3773853 | ACGTTGGATGTGGTTTAAATCTTTGTGAGC | ACGTTGGATGCTGTGAGTGTATCTGAAAAC |
| 3773855 | ACGTTGGATGGCTTGTTTTATGAACTGGAG | ACGTTGGATGTTAATACCATTGGTTAAATC |
| 3821713 | ACGTTGGATGTTCAGGCAACTCAAGTAAGC | ACGTTGGATGTAGAGTGGGTGTTTACACTG |
| 3856760 | ACGTTGGATGTGATCTCAGCTCACTGTAAC | ACGTTGGATGTGTAGTCCCAGCTACTCAGG |
| FCH-1723 | ACGTTGGATGGCTTCAACTGCTTTGCTATG | ACGTTGGATGTTTCTCAGGGTCAATGACTG |
| DLG1_SNP | ACGTTGGATGCTTCATAGTAGCCAGGCTAG | ACGTTGGATGAGCACATGAACAGATGTGTC |

[0278] TABLE 9

| dbSNP | Extend | Term |
|---|---|---|
| rs# | Primer | Mix |
| 604005 | TTATCAACCTACAATGGA | ACG |
| 890491 | TTATGGCCATACGTAAAAAGCA | ACT |
| 958902 | CGGAGGCTTTATTCGTA | ACT |
| 1195059 | AAAGATTTAAACCATCAACCAAAT | ACG |
| 1356612 | GGGTAGTGGTTTCATGATTTTTA | ACG |
| 1839742 | TCCAGCTAATTTTTTGTATTTTTA | ACT |
| 1868890 | CTGAGTCGAACTCTTGTATAAA | ACT |
| 1868891 | GAAAAAGAATTGGGGATTATAAC | ACG |
| 1949471 | CGAACATCTACTTCATTTACT | ACG |
| 2098941 | TCCTCCCACATCAGCCT | ACG |
| 2195027 | GCGTGAGCCACCACACC | ACG |
| 2341225 | CACTGTATTCAGATCTTCATATTT | ACT |
| 2879969 | CATCATACTGCCTCTGG | ACT |
| 3773845 | TTATGTGTTCTCTATTTATTGACT | ACT |
| 3773851 | TTTGTGGTGTGGGATTC | CGT |
| 3773852 | TATTTTCCATTTCCTCTCTG | ACT |
| 3773853 | AAGGGAAACTCATGATTTCTA | ACG |
| 3773855 | AGGCTTTTTGTAGCAGT | ACG |
| 3821713 | GTGGGTGTTTACACTGTTTAATAC | ACT |
| 3856760 | ATGAGAATCACTTGAACCTG | ACT |
| FCH-1723 | CAGGGTCAATGACTGTATATTAC | ACT |
| DLG1_SNP | AGATGTGTCACAAATGCAA | ACT |

Genetic Analysis Allelotyping Results

[0279] Allelotyping results are shown for cases and controls in Table 10. The allele frequency for the A2 allele is noted in the fifth and sixth columns for breast cancer pools and control pools, respectively, where “AF” is allele frequency. The allele frequency for the Al allele can be easily calculated by subtracting the A2 allele frequency from 1 (A1 AF=1−A2 AF). For example, the SNP rs2341225 has the following case and control allele frequencies: case A1(T)=0.747; case A2(C)=0.253; control A1(T)=0.743; and control A2(C)=0.257, where the nucleotide is provided in paranthesis. SNPs with blank allele frequencies were untyped.

TABLE 10

| dbSNP | | Position in | Allele | A2 Case | A2 Control | |
|---|---|---|---|---|---|---|
| rs# | Chromosome | | Variants | AF | AF | p-Value |
| 2341225 | 198233033 | 133 | T/C | 0.253 | 0.257 | 0.8897 |
| 3856760 | 198240838 | 7938 | T/C | 0.959 | 0.985 | 0.0095 |
| 2195027 | 198241773 | 8873 | G/A | 0.651 | 0.691 | 0.1538 |
| 1356612 | 198246121 | 13221 | C/T | 0.197 | 0.243 | 0.0653 |
| 3773845 | 198250188 | 17288 | T/C | 0.415 | 0.414 | 0.9646 |
| 2098941 | 198258632 | 25732 | G/A | 0.281 | 0.335 | 0.0515 |
| 890491 | 198259823 | 26923 | C/G | 0.440 | 0.525 | 0.0051 |
| 1949471 | 198272877 | 39977 | C/T | 0.181 | 0.092 | 0.0001 |
| 3773851 | 198274184 | 41284 | T/A | 0.351 | 0.371 | 0.4824 |
| 3773852 | 198274310 | 41410 | A/C | 0.206 | 0.233 | 0.2786 |
| 3773853 | 198274377 | 41477 | C/T | 0.485 | 0.480 | 0.8660 |
| 1195059 | 198274414 | 41514 | G/A | 0.936 | 0.931 | 0.7361 |
| 3773855 | 198275506 | 42606 | G/A | 0.275 | 0.260 | 0.5723 |
| 3821713 | 198275642 | 42742 | A/C | 0.728 | 0.677 | 0.0666 |
| 604005 | 198292415 | 59515 | G/A | 0.985 | 0.986 | 0.8647 |
| DLG1_SNP | 198292708 | 59808 | T/C | 0.723 | 0.825 | 0.0002 |
| 2879969 | 198293165 | 60265 | C/G | 0.589 | 0.596 | 0.8093 |
| 958902 | 198300052 | 67152 | T/C | 0.215 | 0.264 | 0.0568 |
| 1839742 | 198301232 | 68332 | T/C | 0.928 | 0.946 | 0.2311 |
| 1868890 | 198304028 | 71128 | T/C | 0.420 | 0.422 | 0.9494 |
| 1868891 | 198309327 | 76427 | G/A | 0.220 | 0.217 | 0.8858 |

[0280] FIG. 13 shows the proximal SNPs in and around the DLG1 gene. The position of each SNP on the chromosome is presented on the x-axis. The y-axis gives the negative logarithm (base 10) of the p-value comparing the estimated allele in the case group to that of the control group. The minor allele frequency of the control group for each SNP designated by an X or other symbol on the graphs in FIG. 13 can be determined by consulting Table 10. By proceeding down the Table from top to bottom and across the graphs from left to right the allele frequency associated with each symbol shown can be determined.

[0281] To aid the interpretation, multiple lines have been added to the graph. The broken horizontal lines are drawn at two common significance levels, 0.05 and 0.01. The vertical broken lines are drawn every 20 kb to assist in the interpretation of distances between SNPs. Two other lines are drawn to expose linear trends in the association of SNPs to the disease. The light gray line (or generally bottom-most curve) is a nonlinear smoother through the data points on the graph using a local polynomial regression method (W. S. Cleveland, E. Grosse and W. M. Shyu (1992) Local regression models. Chapter 8 of Statistical Models in S eds J. M. Chambers and T. J. Hastie, Wadsworth & Brooks/Cole). The black line (or generally top-most curve, e.g., see peak in left-most graph just to the left of position 92150000) provides a local test for excess statistical significance to identify regions of association. This was created by use of a 10 kb sliding window with 1 kb step sizes. Within each window, a chi-square goodness of fit test was applied to compare the proportion of SNPs that were significant at a test wise level of 0.01, to the proportion that would be expected by chance alone (0.05 for the methods used here). Resulting p-values that were less than 10⁻⁸ were truncated at that value.

[0282] Finally, the gene or genes present in the loci region of the proximal SNPs as annotated by Locus Link (http address: www.ncbi.nlm.nih.gov/LocusLink/) are provided on the graph. The exons and introns of the genes in the covered region are plotted below each graph at the appropriate chromosomal positions. The gene boundary is indicated by the broken horizontal line. The exon positions are shown as thick, unbroken bars. An arrow is place at the 3′ end of each gene to show the direction of transcription.

### Example 4

### KIAA0783 Proximal SNPs

[0283] It has been discovered that a polymorphic variation (rs220097) in a region that encodes KIAA0783 is associated with the occurrence of breast cancer (see Examples 1 and 2). Subsequently, SNPs proximal to the incident SNP (rs220097) were identified and allelotyped in breast cancer sample sets and control sample sets described in Examples 1 and 2. Approximately fifty-eight allelic variants located within the KIAA0783 region were identified and allelotyped. The polymorphic variants are set forth in Table 11.

TABLE 11

| dbSNP | | Position in | Chromosome | Allele |
|---|---|---|---|---|
| rs# | Chromosome | | Position | Variants |
| 218973 | 7 | 201 | 10710201 | G/A |
| 218962 | 7 | 6395 | 10716395 | T/C |
| 1640705 | 7 | 8558 | 10718558 | T/C |
| 218983 | 7 | 9429 | 10719429 | C/T |
| 190075 | 7 | 9809 | 10719809 | T/G |
| 284856 | 7 | 10072 | 10720072 | C/T |
| 218981 | 7 | 10511 | 10720511 | C/T |
| 218980 | 7 | 11556 | 10721556 | C/G |
| 1640703 | 7 | 16857 | 10726857 | A/G |
| 1640702 | 7 | 16951 | 10726951 | A/G |
| 1640701 | 7 | 17027 | 10727027 | C/G |
| 1681305 | 7 | 17177 | 10727177 | T/C |
| 1640700 | 7 | 17615 | 10727615 | A/C |
| 1640699 | 7 | 17950 | 10727950 | C/G |
| 1154923 | 7 | 18329 | 10728329 | T/G |
| 1154922 | 7 | 18384 | 10728384 | T/C |
| 1154921 | 7 | 18561 | 10728561 | G/A |
| 1154920 | 7 | 18579 | 10728579 | C/T |
| 2510348 | 7 | 18871 | 10728871 | C/G |
| 1681311 | 7 | 27152 | 10737152 | C/T |
| 1681312 | 7 | 27306 | 10737306 | T/C |
| 1681286 | 7 | 28091 | 10738091 | T/C |
| 1640710 | 7 | 28661 | 10738661 | A/C |
| 1681284 | 7 | 29011 | 10739011 | T/C |
| 2110377 | 7 | 29962 | 10739962 | T/G |
| 2110376 | 7 | 29969 | 10739969 | T/G |
| 2160059 | 7 | 30085 | 10740085 | T/C |
| 1681290 | 7 | 31656 | 10741656 | A/G |
| 1681291 | 7 | 31685 | 10741685 | A/G |
| 1681292 | 7 | 31749 | 10741749 | G/A |
| 220091 | 7 | 45389 | 10755389 | T/C |
| 182594 | 7 | 45459 | 10755459 | G/C |
| 220090 | 7 | 46647 | 10756647 | A/G |
| 220097 | 7 | 49860 | 10759860 | T/C |
| 220096 | 7 | 53061 | 10763061 | T/C |
| 220095 | 7 | 57308 | 10767308 | T/A |
| 3801435 | 7 | 61563 | 10771563 | A/G |
| 1681281 | 7 | 61660 | 10771660 | A/G |
| 1026903 | 7 | 62212 | 10772212 | C/T |
| 220093 | 7 | 67090 | 10777090 | T/G |
| 286243 | 7 | 67198 | 10777198 | T/C |
| 3801437 | 7 | 70071 | 10780071 | A/G |
| 3801438 | 7 | 70191 | 10780191 | G/A |
| 2108111 | 7 | 74006 | 10784006 | C/T |
| 2353340 | 7 | 75600 | 10785600 | A/G |
| 3823875 | 7 | 85761 | 10795761 | A/G |
| 2190295 | 7 | 90798 | 10800798 | T/G |
| KIAA0783_SNP1 | 7 | 90883 | 10800883 | C/T |
| 2306768 | 7 | 91259 | 10801259 | T/A |
| 2353341 | 7 | 95416 | 10805416 | C/G |
| 2353342 | 7 | 95446 | 10805446 | T/G |
| 2883140 | 7 | 96368 | 10806368 | G/T |
| 2353343 | 7 | 97050 | 10807050 | T/C |
| 2108114 | 7 | 97362 | 10807362 | C/T |
| 1483204 | 7 | 97630 | 10807630 | A/C |
| 1483202 | 7 | 97989 | 10807989 | T/C |
| 1483201 | 7 | 98107 | 10808107 | C/T |

| | | |
|---|---|---|
| KIAA0783_SNP2 | 7 | NOT MAPPED |

Assay for Verifying and Allelotyping SNPs

[0284] The methods used to verify and allelotype the proximal SNPs of Table 11 are the same methods described in Examples 1 and 2 herein. The PCR primers and extend primers used in these assays are provided in Table 12 and Table 13, respectively.

TABLE 12

| dbSNP | Forward | Reverse |
|---|---|---|
| rs# | PCR primer | PCR primer |
| KIAA0783_ | ACGTTGGATGCCCTAACACTACTCCTTGTC | ACGTTGGATGCCAACACTTCTTGGAGTCTG |
| SNP1 | | |
| KIAA0783_ | ACGTTGGATGAGCCACATTCTCAGATACTG | ACGTTGGATGGGAAAAGAAGGAAGAAGAAG |
| SNP2 | | |
| 182594 | ACGTTGGATGGAGACAGAAAAGTGGTGGAC | ACGTTGGATGCCTTTAAGAAGGCCCTTGTG |
| 190075 | ACGTTGGATGCACAAATTCAGTGGCCAAGC | ACGTTGGATGCTTGTTGTGGACACCTACTG |
| 218962 | ACGTTGGATGCAGGAGTGAGAAGTTCTTTG | ACGTTGGATGTGCTGATTGGTCTATGGGTG |
| 218973 | ACGTTGGATGTCTCACACTGAGGCCTGTAG | ACGTTGGATGTTTGCTGCACCCATCAACTC |
| 218980 | ACGTTGGATGCTTCCCTCCTTTTCTCCTTC | ACGTTGGATGCAAGATCCAATCCAGAAGAC |
| 218981 | ACGTTGGATGAGATTGCTGCCACTACACAC | ACGTTGGATGCTCTTGGCATTCTTAACTCAG |
| 218983 | ACGTTGGATGTCTGCAGTTTCTCTCTCAAC | ACGTTGGATGACCAAATCCAAGATGTAGGG |
| 220090 | ACGTTGGATGCAGCAGAAACTTGATGATGG | ACGTTGGATGAGACACTGAGACTCTGGAGG |
| 220091 | ACGTTGGATGGTGTATACACAAGGGCCTTC | ACGTTGGATGCTGATTGCTGTTTCTGTTAC |
| 220093 | ACGTTGGATGTCCACACTGTGAACAGAGAC | ACGTTGGATGAGTCTAAAAAGGCTGTCAGG |
| 220095 | ACGTTGGATGGCAGCTCAATTTTTAGGAACC | ACGTTGGATGCCCTTGTACACTGTTGCATG |
| 220096 | ACGTTGGATGTAGATTAATTATTGGTTGGC | ACGTTGGATGGCCACCTCCAAAATTAGATC |
| 220097 | ACGTTGGATGTTCCTGGGAATGGATTTCAG | ACGTTGGATGGCAAACGTGCACATTTGCAC |
| 284856 | ACGTTGGATGTGCATGACTACACAAAGAAG | ACGTTGGATGGCAAAATCCTACATTGAGGC |
| 286243 | ACGTTGGATGATGTCTCTGTTCACAGTGTG | ACGTTGGATGCTGGCAAATAGCAATCTAAAC |
| 220097 | ACGTTGGATGTTCCTGGGAATGGATTTCAG | ACGTTGGATGGCAAACGTGCACATTTGCAC |
| 1026903 | ACGTTGGATGGTACTGAAACTCTGAGCATTC | ACGTTGGATGCATCTTATCTGTTTACCATAC |
| 1154920 | ACGTTGGATGGCTGTATATACGAGTTAATGG | ACGTTGGATGAGTGGAGGTGGAGGTGAGGC |
| 1154921 | ACGTTGGATGAAATGCCAATAGCGCCAAGG | ACGTTGGATGAGTAGAAGAGATAAGCCTGG |
| 1154922 | ACGTTGGATGTTTTGCCTCACCAAGATTGC | ACGTTGGATGACAATTTCATTGAGGAGAGG |
| 1154923 | ACGTTGGATGGATGGTTGATCACTTGTGTAG | ACGTTGGATGCTTACCTCCTCTCCTCAATG |
| 1483201 | ACGTTGGATGGTTGCTAAAGTAGTTTCAGCC | ACGTTGGATGACCAAAGAGCTTGTCCCATC |
| 1483202 | ACGTVGGATGGTGCTTTAGAATGTAACACAG | ACGTTGGATGTGGAATTGCACCCTTGCTTG |
| 1483204 | ACGTTGGATGTATCTTATCTAGCAGGCAAC | ACGTTGGATGACTAAGATCACAGGCCTGAG |
| 1640699 | ACGTTGGATGGGTTGGGTGTATGATAGGAG | ACGTTGGATGAGCATGGCTAATCTGTCTGG |
| 1640700 | ACGTTGGATGCTTTATTGACTGCTTTCAATC | ACGTTGGATGAGTGATTACGAGCCTGTACC |
| 1640701 | ACGTTGGATGTTAGGTGCATTGATGCTCTG | ACGTTGGATGCTCAGGCACAGAAAAGATTC |
| 1640702 | ACGTTGGATGCTGTGGTCTCAGGTCACAAA | ACGTTGGATGATGCACCTAAAACAAGAGTC |
| 1640703 | ACGTTGGATGCATAATTTACCTTCCTGGCC | ACGTTGGATGCAAATTTGTGACCTGAGACC |
| 1640705 | ACGTTGGATGACCATCAGAACCAGTATACC | ACGTTGGATGGATGGCCAGAATTGATGTAC |
| 1640710 | ACGTTGGATGCCTTTCCGCTGTATCTCTTG | ACGTTGGATGGGTACAAGGAAGATCCTCAG |
| 1681281 | ACGTTGGATGATTGAGAAAGCAGCTGCTTG | ACGTTGGATGCCAACCTCCCAAATACATCC |
| 1681284 | ACGTTGGATGATAAAATAGGTCTGGGGCTG | ACGTTGGATGGTTTGCTTACTCTGGTACTG |
| 1681286 | ACGTTGGATGGAAATGTAACGCAAAGAGGG | ACGTTGGATGGTTGAAACATTGTCTGCTAG |
| 1681290 | ACGTTGGATGGTACCATAAAATACAATACC | ACGTTGGATGTGGTCCCCCAGTCATCTTAA |
| 1681291 | ACGTTGGATGTAGCAAAACCCTGCCTCTAC | ACGTTGGATGAGGTCAGTGTTCTGGTATTG |
| 1681292 | ACGTTGGATGAGGTCAGTGTTCTGGTATTG | ACGTTGGATGAGCCTGGGCAACATAGCAAA |
| 1681305 | ACGTTGGATGCAGACAGATGTTTAGCTACC | ACGTTGGATGTGAAGTTGTGGATTCCCAGC |
| 1681311 | ACGTTGGATGGCTTGACCAATCATACTTCC | ACGTTGGATGGAAACAAATTGCTCTGAGTCC |
| 1681312 | ACGTTGGATGTCTTCAGGGCAGTAGGATTC | ACGTTGGATGCACATGTGTTTAATACAAGG |
| 2108111 | ACGTTGGATGAGCCTGTAAATGATAGAGCC | ACGTTGGATGGATGTCACAGTACAGCAATG |
| 2108114 | ACGTTGGATGGATAGAAAAGTTAGAGAAATG | ACGTTGGATGAAGGTCACACCACTGCACTC |
| 2110376 | ACGTTGGATGCCAGTTTACACTGGATATTTC | ACGTTGGATGTTGACTAGCTGCTAGAAGGG |
| 2110377 | ACGTTGGATGCCAGTTTACACTGGATATTTC | ACGTTGGATGTTGACTAGCTGCTAGAAGGG |
| 2160059 | ACGTTGGATGTTAAGTACCGGGAAATTCAG | ACGTTGGATGTCATATACCTACGCAGGCTC |
| 2190295 | ACGTTGGATGCTTTTAGAAGTAGTAGGGGC | ACGTTGGATGAGACTCCAAGAAGTGTTGGG |
| 2306768 | ACGTTGGATGAAAGGTGGTTTTGCCAGCTG | ACGTTGGATGCTCAGTCTCCTGAAGTGCTG |
| 2353340 | ACGTTGGATGCCTATCTGCATGTTGCTTAC | ACGTTGGATGGACTCTTGGGAGTACAAATG |
| 2353341 | ACGTTGGATGCACAACCAGAATTTGTAAGTC | ACGTTGGATGCACACGCATGCATCATCTAC |
| 2353342 | ACGTTGGATGTGGTTTTCAGTCAAAGCTGC | ACGTTGGATGCTGAGATCTTTCTTCCTGAC |
| 2353343 | ACGTTGGATGGTTGCAGAGGGAAGCATTTC | ACGTTGGATGCACTTGTGACCAGGTCACTA |
| 2510348 | ACGTTGGATGCTATCCCAGGGCTATGTTTG | ACGTTGGATGGAAGTGGAGGATGAGTTGTG |
| 2883140 | ACGTTGGATGCAGCACTTACTTGTCATGTAG | ACGTTGGATGCATAACCAATTTGTCTTAAC |
| 3801435 | ACGTTGGATGTCAGTATGAAGCAAGCAGCC | ACGTTGGATGATGTCGCTATACTCTGTAGG |
| 3801437 | ACGTTGGATGGTAGCTGAGAAGATGCTCAC | ACGTTGGATGATAGCTGTTCCAGTCTCTTG |
| 3801438 | ACGTTGGATGATACGGTAAAGGTAGTCTGG | ACGTTGGATGTTACCTGTATTGCCCTCTCG |
| 3823875 | ACGTTGGATGCTCAAGAGCCCATCATCATC | ACGTTGGATGGACAGGCTCAGATATTTCAG |

[0285] TABLE 13

| dbSNP | Extend | Term |
|---|---|---|
| rs# | Primer | Mix |
| KIAA0783_ | ATTCAGCACAAGTTGTCA | ACG |
| SNP1 | | |
| KIAA0783_ | GAAAGACCTAGAAAGAAAA | ACT |
| SNP2 | | |
| 182594 | CTCTCTCTTTCTCTCACT | ACT |
| 190075 | GTCTGGAGATCCGAATTT | ACT |
| 218962 | GCACCATCTGATTGGCC | ACT |
| 218973 | CCCAACACTATCCCTTC | ACG |
| 218980 | ATCCAGAAGACAATATTGCATTTA | ACT |
| 218981 | GTATTGCTTTGTTGCCC | ACG |
| 218983 | GGTAAAGAGATGAAGTGC | ACG |
| 220090 | CCCAGATATCCTCGGAA | ACT |
| 220091 | TGTTACTTATTACATTGTCCAA | ACT |
| 220093 | TTATATTCACTCTGAAATCCC | ACT |
| 220095 | CACTGTTGCATGAAATGTA | CGT |
| 220096 | CCTGCTACAAAGGGACCTCA | ACT |
| 220097 | ACAGAGTTTTAAACCTCCTACA | ACT |
| 284856 | TACA1TGAGGCAGTTTGTGCT | ACG |
| 286243 | AGCAATCTAAACATGAGATTGAGC | ACT |
| 220097 | ACAGAGTTTTAAACCTCCTACA | ACT |
| 1026903 | CTTATCTGTTTACCATACAATCTA | ACG |
| 1154920 | CAACACAAAATGCCAATAG | ACG |
| 1154921 | TGTGGCTGTATATACGAGTTAA | ACG |
| 1154922 | TTGAGGAGAGGAGGTAA | ACT |
| 1154923 | CATCAATCTAATCTCATTTCCTAT | ACT |
| 1483201 | TGGGTGGTCCTTTTCTGATA | ACG |
| 1483202 | TAATCATGTGGAATTTCCAG | ACT |
| 1483204 | CAGGCCTGAGCCACTGT | ACT |
| 1640699 | CTAATCTGTCTGGTTAATAGAA | ACT |
| 1640700 | GCAAAAGCAAAAGTAAGCT | ACT |
| 1640701 | AAACAATGGTAATCTAGAGTAAGC | ACT |
| 1640702 | TGATTCAATTTCTGTTGACTACT | ACT |
| 1640703 | GTGACCTGAGACCACAGATC | ACT |
| 1640705 | TCCAAATAAGAAGCCCT | ACT |
| 1640710 | CAGTGTAATAAATTATCAGTTCAT | ACT |
| 1681281 | TGGAGTTCAATATAAAGATACAC | ACT |
| 1681284 | TGTTTTCAGTTTTATTTGCC | ACT |
| 1681286 | TTGTCTGCTAGCCATTT | ACT |
| 1681290 | AATCAGTGTTTCTTTAAAGGTC | ACT |
| 1681291 | CTGGTATTGTATTTTATGGTACT | ACT |
| 1681292 | GGGCAACATAGCAAAACCCTG | ACG |
| 1681305 | TTCCCAGCCCTACTTAC | ACT |
| 1681311 | CTGAGTCCTAAAAAAAGGT | ACG |
| 1681312 | TTAATACAAGGAAATTCCAGC | ACT |
| 2108111 | AGAATTTGAAGACATAAAAACC | ACG |
| 2108114 | GCGACAGAGCAAGACTC | ACG |
| 2110376 | GGGTCAGAGAACTCTATTAA | ACT |
| 2110377 | AGAGAACTCTATTAAGTAGGTC | ACT |
| 2160059 | CTCATGGATCTGTCTTAC | ACT |
| 2190295 | GGGGAAAAAAAAGGTCATATTA | ACT |
| 2306768 | CTGAAGTGCTGGGATTATGGG | CGT |
| 2353340 | TTTTCTGTGCTTTCTTTGT | ACT |
| 2353341 | CATCTACTCTCTTTGAAGTT | ACT |
| 2353342 | CTTTCTTCCTGACTTACAAATTC | ACT |
| 2353343 | GTGTTTTTGTTGACATATCAAT | ACT |
| 2510348 | GGAGGATGAGTTGTGTTGACT | ACT |
| 2883140 | TTGTCTTAACTACTATAAACTGAA | CGT |
| 3801435 | GCTATACTCTGTAGGAGTTTATCT | ACG |
| 3801437 | CAGTCTCTTGATTTTAAGGA | ACT |
| 3801438 | CTCGTACTTTTGCCCAC | ACG |
| 3823875 | ATTTCAGTGATATAGGAGTCT | ACT |

Genetic Analysis of Allelotyping Results

[0286] Allelotyping results are shown for cases and controls in Table 14. The allele frequency for the A2 allele is noted in the fifth and sixth columns for breast cancer pools and control pools, respectively, where “AF” is allele frequency. The allele frequency for the A1 allele can be easily calculated by subtracting the A2 allele frequency from 1 (A1 AF=1−A2 AF). For example, the SNP rs218973 has the following case and control allele frequencies: case A1(G)=0.640; case A2(A)=0.360; control A1(G)=0.645; and control A2(A)=0.355, where the nucleotide is provided in paranthesis. SNPs with blank allele frequencies were untyped.

TABLE 14

| dbSNP | Position in | Chromosome | A1/A2 | A2 Case | A2 Control | |
|---|---|---|---|---|---|---|
| rs# | | Position | Allele | AF | AF | p-Value |
| 218973 | 201 | 10710201 | G/A | 0.360 | 0.355 | 0.8462 |
| 218962 | 6395 | 10716395 | T/C | 0.547 | 0.535 | 0.6939 |
| 1640705 | 8558 | 10718558 | T/C | 0.601 | 0.568 | 0.2583 |
| 218983 | 9429 | 10719429 | C/T | 0.561 | 0.558 | 0.9406 |
| 190075 | 9809 | 10719809 | T/G | 0.447 | 0.428 | 0.5348 |
| 284856 | 10072 | 10720072 | C/T | 0.612 | 0.585 | 0.3555 |
| 218981 | 10511 | 10720511 | C/T | 0.432 | 0.363 | 0.0189 |
| 218980 | 11556 | 10721556 | C/G | 0.409 | 0.471 | 0.0378 |
| 1640703 | 16857 | 10726857 | A/G | 0.841 | 0.859 | 0.3809 |
| 1640702 | 16951 | 10726951 | A/G | 0.674 | 0.656 | 0.5269 |
| 1640701 | 17027 | 10727027 | C/G | 0.266 | 0.270 | 0.9020 |
| 1681305 | 17177 | 10727177 | T/C | 0.422 | 0.483 | 0.0406 |
| 1640700 | 17615 | 10727615 | A/C | 0.456 | 0.423 | 0.2641 |
| 1640699 | 17950 | 10727950 | C/G | 0.344 | 0.370 | 0.3558 |
| 1154923 | 18329 | 10728329 | T/G | 0.885 | 0.878 | 0.7144 |
| 1154922 | 18384 | 10728384 | T/C | 0.406 | 0.479 | 0.0151 |
| 1154921 | 18561 | 10728561 | G/A | 0.367 | 0.365 | 0.9611 |
| 1154920 | 18579 | 10728579 | C/T | 0.284 | 0.248 | 0.1803 |
| 2510348 | 18871 | 10728871 | C/G | 0.409 | 0.425 | 0.5940 |
| 1681311 | 27152 | 10737152 | C/T | 0.251 | 0.279 | 0.3099 |
| 1681312 | 27306 | 10737306 | T/C | 0.303 | 0.260 | 0.1171 |
| 1681286 | 28091 | 10738091 | T/C | 0.557 | 0.544 | 0.6560 |
| 1640710 | 28661 | 10738661 | A/C | 0.455 | 0.515 | 0.0472 |
| 1681284 | 29011 | 10739011 | T/C | 0.418 | 0.388 | 0.3124 |
| 2110377 | 29962 | 10739962 | T/G | 0.080 | 0.058 | 0.1549 |
| 2110376 | 29969 | 10739969 | T/G | 0.265 | 0.313 | 0.0798 |
| 2160059 | 30085 | 10740085 | T/C | 0.066 | 0.063 | 0.8793 |
| 1681290 | 31656 | 10741656 | A/G | 0.222 | 0.287 | 0.0129 |
| 1681291 | 31685 | 10741685 | A/G | 0.017 | 0.042 | 0.0143 |
| 1681292 | 31749 | 10741749 | G/A | 0.335 | 0.392 | 0.0458 |
| 220091 | 45389 | 10755389 | T/C | 0.245 | 0.326 | 0.0034 |
| 182594 | 45459 | 10755459 | G/C | 0.238 | 0.325 | 0.0017 |
| 220090 | 46647 | 10756647 | A/G | 0.332 | 0.411 | 0.0066 |
| 220097 | 49860 | 10759860 | T/C | 0.258 | 0.343 | 0.0025 |
| 220096 | 53061 | 10763061 | T/C | 0.240 | 0.301 | 0.0214 |
| 220095 | 57308 | 10767308 | T/A | 0.618 | 0.526 | 0.0026 |
| 3801435 | 61563 | 10771563 | A/G | 0.622 | 0.507 | 0.0002 |
| 1681281 | 61660 | 10771660 | A/G | 0.501 | 0.433 | 0.0235 |
| 1026903 | 62212 | 10772212 | C/T | 0.855 | 0.859 | 0.8503 |
| 220093 | 67090 | 10777090 | T/G | 0.564 | 0.461 | 0.0009 |
| 286243 | 67198 | 10777198 | T/C | 0.591 | 0.519 | 0.0170 |
| 3801437 | 70071 | 10780071 | A/G | 0.385 | 0.459 | 0.0141 |
| 3801438 | 70191 | 10780191 | G/A | 0.018 | 0.022 | 0.6491 |
| 2108111 | 74006 | 10784006 | C/T | 0.360 | 0.438 | 0.0090 |
| 2353340 | 75600 | 10785600 | A/G | 0.234 | 0.309 | 0.0056 |
| 3823875 | 85761 | 10795761 | A/G | 0.502 | 0.409 | 0.0025 |
| 2190295 | 90798 | 10800798 | T/G | 0.319 | 0.402 | 0.0045 |
| KIAA0783_SNP1 | 90883 | 10800883 | C/T | 0.309 | 0.396 | 0.0030 |
| 2306768 | 91259 | 10801259 | T/A | 0.558 | 0.472 | 0.0051 |
| 2353341 | 95416 | 10805416 | C/G | 0.163 | 0.248 | 0.0008 |
| 2353342 | 95446 | 10805446 | T/G | 0.118 | 0.176 | 0.0068 |
| 2883140 | 96368 | 10806368 | G/T | 0.672 | 0.561 | 0.0003 |
| 2353343 | 97050 | 10807050 | T/C | 0.071 | 0.075 | 0.8073 |
| 2108114 | 97362 | 10807362 | C/T | 0.433 | 0.321 | 0.0003 |
| 1483204 | 97630 | 10807630 | A/C | 0.063 | 0.093 | 0.0706 |
| 1483202 | 97989 | 10807989 | T/C | 0.643 | 0.567 | 0.0101 |
| 1483201 | 98107 | 10808107 | C/T | 0.688 | 0.598 | 0.0022 |

| | | | | |
|---|---|---|---|---|
| KIAA0783_SNP2 | NOT MAPPED | 0.411 | 0.459 | 0.1085 |

[0287] FIG. 14 shows the proximal SNPs in and around the KIAA0783 region. The position of each SNP on the chromosome is presented on the x-axis. The y-axis gives the negative logarithm (base 10) of the p-value comparing the estimated allele in the case group to that of the control group. The minor allele frequency of the control group for each SNP designated by an X or other symbol on the graphs in FIG. 14 can be determined by consulting Table 14. By proceeding down the Table from top to bottom and across the graphs from left to right the allele frequency associated with each symbol shown can be determined.

[0288] To aid the interpretation, multiple lines have been added to the graph. The broken horizontal lines are drawn at two common significance levels, 0.05 and 0.01. The vertical broken lines are drawn every 20 kb to assist in the interpretation of distances between SNPs. Two other lines are drawn to expose linear trends in the association of SNPs to the disease. The light gray line (or generally bottom-most curve) is a nonlinear smoother through the data points on the graph using a local polynomial regression method (W. S. Cleveland, E. Grosse and W. M. Shyu (1992) Local regression models. Chapter 8 of Statistical Models in S eds J. M. Chambers and T. J. Hastie, Wadsworth & Brooks/Cole). The black line (or generally top-most curve, e.g., see peak in left-most graph just to the left of position 92150000) provides a local test for excess statistical significance to identify regions of association. This was created by use of a 10 kb sliding window with 1 kb step sizes. Within each window, a chi-square goodness of fit test was applied to compare the proportion of SNPs that were significant at a test wise level of 0.01, to the proportion that would be expected by chance alone (0.05 for the methods used here). Resulting p-values that were less than 10⁻⁸ were truncated at that value.

[0289] Finally, the gene or genes present in the loci region of the proximal SNPs as annotated by Locus Link (http address: www.ncbi.nlm.nih.gov/LocusLink/) are provided on the graph. The exons and introns of the genes in the covered region are plotted below each graph at the appropriate chromosomal positions. The gene boundary is indicated by the broken horizontal line. The exon positions are shown as thick, unbroken bars. An arrow is place at the 3′ end of each gene to show the direction of transcription.

### Example 5

### DPF3 Proximal SNPs

[0290] It has been discovered that a polymorphic variation (rs1990440) in a gene encoding DPF3 is associated with the occurrence of breast cancer (see Examples 1 and 2). Subsequently, SNPs proximal to the incident SNP (rs1990440) were identified and allelotyped in breast cancer sample sets and control sample sets as described in Examples 1 and 2. A total of forty allelic variants located within or nearby the DPF3 gene were identified and allelotyped. The polymorphic variants are set forth in Table 15. The chromosome position provided in column four of Table 15 is based on Genome “Build 33” of NCBI's GenBank.

TABLE 15

| dbSNP | | Position in | Chromosome | Allele |
|---|---|---|---|---|
| rs# | Chromosome | | Position | Variants |
| 2052146 | 14 | 160 | 71227260 | A/C |
| 2052145 | 14 | 6053 | 71233153 | T/G |
| 740980 | 14 | 9719 | 71236819 | A/G |
| 758915 | 14 | 10481 | 71237581 | T/C |
| 758914 | 14 | 10676 | 71237776 | A/T |
| 2098195 | 14 | 17179 | 71244279 | C/G |
| 740979 | 14 | 18561 | 71245661 | A/T |
| 740978 | 14 | 18658 | 71245758 | G/C |
| 740977 | 14 | 18694 | 71245794 | A/G |
| 740976 | 14 | 18858 | 71245958 | T/C |
| 2052143 | 14 | 24582 | 71251682 | G/A |
| 2052142 | 14 | 24683 | 71251783 | G/A |
| 2052141 | 14 | 24767 | 71251867 | C/T |
| 758913 | 14 | 27402 | 71254502 | A/G |
| 740975 | 14 | 28150 | 71255250 | T/G |
| 747987 | 14 | 28494 | 71255594 | T/C |
| 1126160 | 14 | 32003 | 71259103 | A/C |
| 2332918 | 14 | 35588 | 71262688 | C/T |
| 2332919 | 14 | 35619 | 71262719 | T/C |
| 1990443 | 14 | 35856 | 71262956 | G/A |
| 3937455 | 14 | 36254 | 71263354 | G/C |
| 973963 | 14 | 37314 | 71264414 | G/A |
| 1990441 | 14 | 40033 | 71267133 | T/G |
| 1990440 | 14 | 40095 | 71267195 | G/C |
| 2159715 | 14 | 42593 | 71269693 | A/C |
| 2109795 | 14 | 42799 | 71269899 | A/G |
| 2159714 | 14 | 43090 | 71270190 | G/A |
| 1468662 | 14 | 46683 | 71273783 | A/G |
| 2215591 | 14 | 49774 | 71276874 | A/G |
| 2109794 | 14 | 51796 | 71278896 | C/T |
| 2877821 | 14 | 52079 | 71279179 | A/T |
| 2191822 | 14 | 53857 | 71280957 | T/C |
| 2191821 | 14 | 53971 | 71281071 | A/C |
| 1544579 | 14 | 55899 | 71282999 | T/C |
| 2215590 | 14 | 60682 | 71287782 | G/A |
| 1004552 | 14 | 61291 | 71288391 | C/T |
| 1860749 | 14 | 72720 | 71299820 | G/A |
| 1860748 | 14 | 72752 | 71299852 | A/C |
| 763388 | 14 | 85507 | 71312607 | A/G |
| 1035099 | 14 | 89751 | 71316851 | T/A |

Assay for Verifying and Allelotyping SNPs

[0291] The methods used to verify and allelotype the sixty-three proximal SNPs of Table 15 are the same methods described in Examples 1 and 2 herein. The PCR primers and extend primers used in these assays are provided in Table 16 and Table 17, respectively.

TABLE 16

| dbSNP | Forward | Reverse |
|---|---|---|
| rs# | PCR primer | PCR primer |
| 740975 | ACGTTGGATGGAAACCAAGATAGGAAATGG | ACGTTGGATGCTCAGTGCCAGAAATACCAG |
| 740976 | ACGTTGGATGTCCTGTTTCTAAGCAGGGAG | ACGTTGGATGATCAGGACTACCTGAGCAAC |
| 740977 | ACGTTGGATGTCCAGTGAGGCCTCCCTCCAA | ACGTTGGATGCAGCAACCCAAAGCAACACG |
| 740978 | ACGTTGGATGTAGCCACGCCATTATTGGAG | ACGTTGGATGCTTCACATCCCTCCTCAAAG |
| 740979 | ACGTTGGATGATCCTAACCAGGTCTGATGG | ACGTTGGATGAAGGGCCAAGCAATGCTTTG |
| 740980 | ACGTTGGATGGGTAGGGCTGTCTGTTTCAT | ACGTTGGATGATGCCTGCCACATTGGGTAA |
| 747987 | ACGTTGGATGAGGTCTGGCACTGCTAAATG | ACGTTGGATGCCTTGTGAACTTCCAACCTG |
| 758913 | ACGTTGGATGCCTAGCCAACATCCTTTTCC | ACGTTGGATGAGCAACCAGTCTAGTTTTCG |
| 758914 | ACGTTGGATGCCCTTGTTTTAGAGGTTGGG | ACGTTGGATGTGTGATCCAGACATCAGCTC |
| 758915 | ACGTTGGATGCAAGAAGGGCATTTCTACCC | ACGTTGGATGCAATGCTGCTGACATCAGAC |
| 763388 | ACGTTGGATGGGGTACTCTTAGCTGAGAAC | ACGTTGGATGTACAGGGATTGTGATGTGGG |
| 973963 | ACGTTGGATGGATTTGTTCTGGCAGGAATG | ACGTTGGATGACAAACCACTAAACTTTCAG |
| 1004552 | ACGTTGGATGGATCATCCAAGTATGCTCCC | ACGTTGGATGGCAAAACCCAGTGCCAAAAC |
| 1035099 | ACGTTGGATGAAAGGGTACCCAGACTTCAC | ACGTTGGATGTGGGGAGAACTTTGGTCAAC |
| 1126160 | ACGTTGGATGGGGTTCTCTCTTGACAGATG | ACGTTGGATGTGTTCTCACCCTGTTCTGTT |
| 1468662 | ACGTTGGATGGCTAGAAATCACCAGCAACC | ACGTTGGATGTCATGTAGGTTGGCTCTGAC |
| 1544579 | ACGTTGGATGACCATTATCATCTTCCCAGG | ACGTTGGATGCCTTATCTCTCTAAGACATGC |
| 1860748 | ACGTTGGATGACTCGACTAGCTAGTCTTGG | ACGTTGGATGAAAGCAATCCAGCGGACAAG |
| 1860749 | ACGTTGGATGTCCCCGGAATGATACATGAC | ACGTTGGATGAACATGATTAAGGATAAAGC |
| 1990440 | ACGTTGGATGAAGTCACTAACCCCACACAC | ACGTTGGATGCCAGGGTGTGTTCTAATACG |
| 1990441 | ACGTTGGATGTCAGAGATATGCACTGCAAG | ACGTTGGATGCACACCCTGGCATGAATGTG |
| 1990443 | ACGTTGGATGCACTGGATTTGGCAAGAAGG | ACGTTGGATGTACATGATCCTCCCCTCTAC |
| 2052141 | ACGTTGGATGCCTGCAAAATCCCTCATACC | ACGTTGGATGATAGAAGCGTGACCTTACCC |
| 2052142 | ACGTTGGATGGGTATGAGGGATTTTGCAGG | ACGTTGGATGACTGGACTCACCCACATAAG |
| 2052143 | ACGTTGGATGCCAGTGTAATCACAAGGGTC | ACGTTGGATGTGTGTCACTTCTACCTCCAC |
| 2052145 | ACGTTGGATGGTGCTGGCTGCCTAGTTCTA | ACGTTGGATGGGCTTCTCAATTCAGATGGG |
| 2052146 | ACGTTGGATGCCACAAAAGCACGTGATTTC | ACGTTGGATGTTATTTGAGCTCTGATAGTG |
| 2098195 | ACGTTGGATGGCTCCAGTCTCTAATCACAC | ACGTTGGATGCAAAGTTCTCTGCCTGAGTG |
| 2109794 | ACGTTGGATGTAATCCCAGCACTTTGGGAG | ACGTTGGATGAGGCTGATCTTGAACTCCTG |
| 2109795 | ACGTTGGATGCAAACAAGGTCCCAGCATTC | ACGTTGGATGTCCTGACTCTCTCAAAACCC |
| 2159714 | ACGTTGGATGAAACTCTCTCGTTGCTGTGG | ACGTTGGATGAAAGCCCCTCTAGCAAAAGG |
| 2159715 | ACGTTGGATGCTGCCTGCAAGTTCCCATTG | ACGTTGGATGTACAGGCACTGGCGAAGAAG |
| 2191821 | ACGTTGGATGGAAAGTGTCCTTAGCTTGCC | ACGTTGGATGTGAGATGGATCTGGAGCCAC |
| 2191822 | ACGTTGGATGATTTTTCCCGGCATCTGACC | ACGTTGGATGTGCAAAGTGGTGGAGGAAAG |
| 2215590 | ACGTTGGATGTCCAAGAAGGACAGCAGTAG | ACGTTGGATGATGAGAGCCTTTCTTCAGGG |
| 2215591 | ACGTTGGATGATTTGTTAAAATTCATAGAAC | ACGTTGGATGTCCCCAGTTTGCATCTTGAC |
| 2332918 | ACGTTGGATGAACCCATGGGACCACAATTC | ACGTTGGATGTAGGATGGGTGTTTCCTAGC |
| 2332919 | ACGTTGGATGTCTGAGGGCTCTCTCTAATG | ACGTTGGATGATGAAGGAAGAAGCCCTGAC |
| 2877821 | ACGTTGGATGATAATCTATGTCCTAGATTG | ACGTTGGATGTAGTAGCATTCCAAGTGCCC |
| 3937455 | ACGTTGGATGGCAAGAATAGGTTCTTTCGC | ACGTTGGATGACCTCCACACTCATTACCTC |

[0292] TABLE 17

| dbSNP | Extend | Term |
|---|---|---|
| rs# | Primer | Mix |
| 740975 | ACCAGCTCTCTTTGGAT | ACT |
| 740976 | ATCCAGATGGCCCTGAC | ACT |
| 740977 | TGGTTTTCGAATAAGTAGCCAC | ACT |
| 740978 | AAGCCTTCCTATCCCCA | ACT |
| 740979 | TGCTTTGGGGCAGACTGAC | CGT |
| 740980 | CACATTGGGTAAATGATGA | ACT |
| 747987 | AACCTGGTTCTGCCATT | ACT |
| 758913 | CCAGTCTAGTTTTCGATCACC | ACT |
| 758914 | CCCCAGTGATCCTGAGAAAT | CGT |
| 758915 | GACATCAGACCTATGCCAGGA | ACT |
| 763388 | CACTCATGCCTCAAGCCAAT | ACT |
| 973963 | AACAACCAACTCTCCAG | ACG |
| 1004552 | TCTTGGCTCAGTGCTGC | ACG |
| 1035099 | TTGGTCAACATCGCAGC | CGT |
| 1126160 | GAAGCCCATCGCTAAGTGTTT | ACT |
| 1468662 | CTCTGACTGAGGAGAGACC | ACT |
| 1544579 | GACATGCATCAAAGCAGCTG | ACT |
| 1860748 | TCTTGGAGCCATATTTTATTTG | ACT |
| 1860749 | TTAAGGATAAAGCAATCCAG | ACG |
| 1990440 | CGTCAGCAAATGTGTACCGA | ACT |
| 1990441 | CATGAATGTGATTCACATTCTCC | ACT |
| 1990443 | TTCCCCTCAGCTCTTAG | ACG |
| 2052141 | CTTACCCCCAAAGATGTCCA | ACG |
| 2052142 | AGCCAGGATAATCTCCTCA | ACG |
| 2052143 | TCTACCTCCACTTCCAA | ACG |
| 2052145 | ATTCAGATGGGATCACAGAAG | ACT |
| 2052146 | GAGCTCTGATAGTGATTGTGAGT | ACT |
| 2098195 | TAAACCTTTCTATGTTCCTG | ACT |
| 2109794 | CTCAGGTGATCCACCCA | ACG |
| 2109795 | TCCCAGAATTTGGAGCC | ACT |
| 2159714 | CAAAAGGATCTGCAAAAG | ACG |
| 2159715 | CATAGGGATAGGAATGGG | ACT |
| 2191821 | ATGTGGGTTTGGACTGGGGCT | ACT |
| 2191822 | AGGAAAGGAATGTCTGCCCC | ACT |
| 2215590 | CAGGGCCAGCCATGAACGT | ACG |
| 2215591 | TTCAATAAAATGTACTCATTCAAA | ACT |
| 2332918 | TCTCTCTAATGGGGACC | ACG |
| 2332919 | ACTGGATCCCAGAAGAG | ACT |
| 2877821 | CCCTGTTCTGCACCTTTAAA | CGT |
| 3937455 | TCCTTTTTTCCCCACCC | ACT |

Genetic Analysis of Allelotyping Results

[0293] Allelotyping results are shown for cases and controls in Table 18. The allele frequency for the A2 allele is noted in the fifth and sixth columns for breast cancer pools and control pools, respectively, where “AF” is allele frequency. The allele frequency for the Al allele can be easily calculated by subtracting the A2 allele frequency from 1 (A1 AF=1−A2 AF). For example, the SNP in row 2 of Table 13 (rs2052146) has the following case and control allele frequencies: case A1(A)=0.990; case A2(C)=0.010; A1(A)=0.948; and control A2(C)=0.052, where the nucleotide is provided in parenthesis. SNPs with blank allele frequencies were untyped (“not AT”).

TABLE 18

| dbSNP | Position | Chr m | Alleles | A2 Case | A2 Contr 1 | |
|---|---|---|---|---|---|---|
| rs# | in FIG. 3 | Position | (A1/A2) | AF | AF | p-Value |
| 2052146 | 160 | 71227260 | A/C | 0.010 | 0.042 | 0.0014 |
| 2052145 | 6053 | 71233153 | T/G | 0.858 | 0.776 | 0.0007 |
| 740980 | 9719 | 71236819 | A/G | 0.620 | 0.644 | 0.4134 |
| 758915 | 10481 | 71237581 | T/C | 0.718 | 0.718 | 0.9903 |
| 758914 | 10676 | 71237776 | A/T | 0.754 | 0.749 | 0.8560 |
| 2098195 | 17179 | 71244279 | C/G | 0.976 | 0.989 | 0.1034 |
| 740979 | 18561 | 71245661 | A/T | 0.656 | 0.694 | 0.1850 |
| 740978 | 18658 | 71245758 | G/C | 0.011 | 0.047 | 0.0005 |
| 740977 | 18694 | 71245794 | A/G | 0.913 | 0.873 | 0.0353 |
| 740976 | 18858 | 71245958 | T/C | 0.610 | 0.676 | 0.0217 |
| 2052143 | 24582 | 71251682 | G/A | 0.466 | 0.405 | 0.0418 |
| 2052142 | 24683 | 71251783 | G/A | 0.015 | 0.051 | 0.0011 |
| 2052141 | 24767 | 71251867 | C/T | 0.363 | 0.315 | 0.0950 |
| 758913 | 27402 | 71254502 | A/G | 0.931 | 0.871 | 0.0011 |
| 740975 | 28150 | 71255250 | T/G | 0.461 | 0.514 | 0.0763 |
| 747987 | 28494 | 71255594 | T/C | 0.715 | 0.813 | 0.0003 |
| 1126160 | 32003 | 71259103 | A/C | 0.349 | 0.409 | 0.0392 |
| 2332918 | 35588 | 71262688 | C/T | 0.041 | 0.070 | 0.0355 |
| 2332919 | 35619 | 71262719 | T/C | 0.300 | 0.271 | 0.2797 |
| 1990443 | 35856 | 71262956 | G/A | 0.324 | 0.268 | 0.0407 |
| 3937455 | 36254 | 71263354 | G/C | 0.445 | 0.455 | 0.7518 |
| 973963 | 37314 | 71264414 | G/A | 0.029 | 0.035 | 0.6030 |
| 1990441 | 40033 | 71267133 | T/G | 0.128 | 0.152 | 0.2380 |
| 1990440 | 40095 | 71267195 | G/C | 0.744 | 0.842 | 0.0002 |
| 2159715 | 42593 | 71269693 | A/C | 0.534 | 0.542 | 0.7822 |
| 2109795 | 42799 | 71269899 | A/G | 0.795 | 0.747 | 0.0582 |
| 2159714 | 43090 | 71270190 | G/A | 0.035 | 0.036 | 0.9187 |
| 1468662 | 46683 | 71273783 | A/G | 0.035 | 0.069 | 0.0118 |
| 2215591 | 49774 | 71276874 | A/G | 0.892 | 0.857 | 0.0776 |
| 2109794 | 51796 | 71278896 | C/T | 0.042 | 0.041 | 0.9714 |
| 2877821 | 52079 | 71279179 | A/T | 0.778 | 0.862 | 0.0005 |
| 2191822 | 53857 | 71280957 | T/C | 0.899 | 0.845 | 0.0078 |
| 2191821 | 53971 | 71281071 | A/C | 0.427 | 0.422 | 0.8733 |
| 1544579 | 55899 | 71282999 | T/C | 0.496 | 0.483 | 0.6724 |
| 2215590 | 60682 | 71287782 | G/A | 0.271 | 0.285 | 0.5936 |
| 1004552 | 61291 | 71288391 | C/T | 0.393 | 0.378 | 0.5996 |
| 1860749 | 72720 | 71299820 | G/A | 0.652 | 0.522 | 0.0001 |
| 1860748 | 72752 | 71299852 | A/C | 0.894 | 0.820 | 0.0007 |
| 763388 | 85507 | 71312607 | A/G | 0.291 | 0.310 | 0.4883 |
| 1035099 | 89751 | 71316851 | T/A | 0.555 | 0.543 | 0.7079 |

[0294] FIG. 15 shows the proximal SNPs in and around the DPF3 gene. As indicated, some of the SNPs were untyped. The position of each SNP on the chromosome is presented on the x-axis. The y-axis gives the negative logarithm (base 10) of the p-value comparing the estimated allele in the case group to that of the control group. The minor allele frequency of the control group for each SNP designated by an X or other symbol on the graphs in FIG. 15 can be determined by consulting Table 18. By proceeding down the Table from top to bottom and across the graphs from left to right the allele frequency associated with each symbol shown can be determined.

[0295] To aid the interpretation, multiple lines have been added to the graph. The broken horizontal lines are drawn at two common significance levels, 0.05 and 0.01. The vertical broken lines are drawn every 20 kb to assist in the interpretation of distances between SNPs. Two other lines are drawn to expose linear trends in the association of SNPs to the disease. The light gray line (or generally bottom-most curve) is a nonlinear smoother through the data points on the graph using a local polynomial regression method (W. S. Cleveland, E. Grosse and W. M. Shyu (1992) Local regression models. Chapter 8 of Statistical Models in S eds J. M. Chambers and T. J. Hastie, Wadsworth & Brooks/Cole). The black line (or generally top-most curve, e.g., see peak in left-most graph just to the left of position 92150000) provide a local test for excess statistical significance to identify regions of association. This was created by use of a 10 kb sliding window with 1 kb step sizes. Within each window, a chi-square goodness of fit test was applied to compare the proportion of SNPs that were significant at a test wise level of 0.01, to the proportion that would be expected by chance alone (0.05 for the methods used here). Resulting p-values that were less than 10⁻⁸ were truncated at that value.

[0296] Finally, the gene or genes present in the loci region of the proximal SNPs as annotated by Locus Link (http address: www.ncbi.nlm.nih.gov/LocusLink/) are provided on the graph. The exons and introns of the genes in the covered region are plotted below each graph at the appropriate chromosomal positions. The gene boundary is indicated by the broken horizontal fine. The exon positions are shown as thick, unbroken bars. An arrow is place at the 3′ end of each gene to show the direction of transcription.

### Example 6

### CENCP1 Proximal SNPs

[0297] It has been discovered that a polymorphic variation (rs355510) in the CENPC1 region is associated with the occurrence of breast cancer (see Examples 1 and 2). Subsequently, SNPs proximal to the incident SNP (rs355510) were identified and allelotyped in breast cancer sample sets and control sample sets as described in Examples 1 and 2. Approximately seventy-nine allelic variants located within the CENPC1 region were identified and allelotyped. The polymorphic variants are set forth in Table 19. The chromosome position provided in column four of Table 19 is based on Genome “Build 33” of NCBI's GenBank.

TABLE 19

| dbSNP | | Position in | Chromosome | Allele |
|---|---|---|---|---|
| rs# | Chromosome | | Position | Variants |
| 1874633 | 4 | 196 | 68275196 | A/G |
| 1846060 | 4 | 13311 | 68288311 | G/A |
| 451352 | 4 | 14486 | 68289486 | C/T |
| 355468 | 4 | 14691 | 68289691 | A/T |
| 355469 | 4 | 15551 | 68290551 | C/G |
| 355470 | 4 | 17702 | 68292702 | T/C |
| 355471 | 4 | 17872 | 68292872 | T/C |
| 191650 | 4 | 19588 | 68294588 | T/C |
| 355472 | 4 | 19910 | 68294910 | T/A |
| 1874635 | 4 | 20006 | 68295006 | A/C |
| 1497430 | 4 | 20575 | 68295575 | A/G |
| 2254659 | 4 | 21092 | 68296092 | G/A |
| 3822197 | 4 | 22830 | 68297830 | C/T |
| 2632453 | 4 | 23455 | 68298455 | A/G |
| 2646282 | 4 | 23716 | 68298716 | G/A |
| 2646285 | 4 | 23890 | 68298890 | T/G |
| 768244 | 4 | 24001 | 68299001 | C/T |
| 724199 | 4 | 24995 | 68299995 | G/A |
| 1187960 | 4 | 27282 | 68302282 | T/C |
| 1187961 | 4 | 27779 | 68302779 | C/T |
| 355518 | 4 | 29099 | 68304099 | C/G |
| 355519 | 4 | 31185 | 68306185 | A/G |
| 355511 | 4 | 33994 | 68308994 | C/T |
| 451397 | 4 | 34942 | 68309942 | T/C |
| 355513 | 4 | 35137 | 68310137 | C/G |
| 355514 | 4 | 36538 | 68311538 | T/C |
| 355515 | 4 | 37139 | 68312139 | C/T |
| 1056789 | 4 | 37358 | 68312358 | G/A |
| 2646290 | 4 | 38828 | 68313828 | A/G |
| 190255 | 4 | 39469 | 68314469 | T/C |
| 355466 | 4 | 40233 | 68315233 | T/C |
| 355465 | 4 | 40472 | 68315472 | A/T |
| 2646292 | 4 | 41679 | 68316679 | C/T |
| 2632454 | 4 | 41682 | 68316682 | G/A |
| 1056787 | 4 | 42831 | 68317831 | A/G |
| CENPC1_SNP1 | 4 | 42976 | 68317976 | A/G |
| 173317 | 4 | 44128 | 68319128 | A/G |
| 451344 | 4 | 44195 | 68319195 | C/T |
| 355510 | 4 | 46769 | 68321769 | G/A |
| 355508 | 4 | 47363 | 68322363 | G/C |
| 451391 | 4 | 48843 | 68323843 | C/T |
| 355500 | 4 | 52574 | 68327574 | A/G |
| 355499 | 4 | 52602 | 68327602 | A/G |
| 355498 | 4 | 53212 | 68328212 | A/G |
| 1187974 | 4 | 53781 | 68328781 | C/G |
| 355493 | 4 | 54710 | 68329710 | A/T |
| 2632456 | 4 | 55808 | 68330808 | G/A |
| 1825790 | 4 | 57987 | 68332987 | T/A |
| 355475 | 4 | 58556 | 68333556 | C/A |
| 1391110 | 4 | 59148 | 68334148 | T/A |
| 1442557 | 4 | 59286 | 68334286 | G/C |
| 355478 | 4 | 60217 | 68335217 | A/G |
| 189579 | 4 | 60412 | 68335412 | G/T |
| 355480 | 4 | 60753 | 68335753 | C/T |
| 355481 | 4 | 60791 | 68335791 | T/G |
| 355483 | 4 | 61524 | 68336524 | A/G |
| 355485 | 4 | 62543 | 68337543 | T/C |
| 2646267 | 4 | 62825 | 68337825 | A/G |
| 2646268 | 4 | 62826 | 68337826 | A/C |
| 355486 | 4 | 62857 | 68337857 | C/T |
| 355487 | 4 | 63400 | 68338400 | T/C |
| 355488 | 4 | 63960 | 68338960 | T/A |
| 355489 | 4 | 64307 | 68339307 | A/G |
| 451376 | 4 | 64539 | 68339539 | A/G |
| 1353626 | 4 | 65728 | 68340728 | A/G |
| 2632450 | 4 | 66000 | 68341000 | G/A |
| 2646269 | 4 | 66521 | 68341521 | T/G |
| 2276945 | 4 | 68185 | 68343185 | C/T |
| 3775861 | 4 | 69643 | 68344643 | G/A |
| 1403151 | 4 | 74909 | 68349909 | C/A |
| 1843833 | 4 | 82973 | 68357973 | T/G |
| 1843831 | 4 | 83039 | 68358039 | T/C |
| 3806810 | 4 | 85713 | 68360713 | A/G |
| 3775862 | 4 | 86873 | 68361873 | T/C |
| 1962700 | 4 | 90293 | 68365293 | T/G |
| 2046601 | 4 | 91810 | 68366810 | T/G |
| 2171386 | 4 | 92609 | 68367609 | A/G |
| 2046599 | 4 | 92884 | 68367884 | G/A |
| 355490 | 4 | | | A/T |

Assay for Verifying and Allelotyping SNPs

[0298] The methods used to verify and allelotype the proximal SNPs of Table 19 are the same methods described Examples 1 and 2 herein. The PCR primers and extend primers used in these assays are provided in Table 20 and Table 21, respectively.

TABLE 20

| dbSNP | Forward | Reverse |
|---|---|---|
| rs# | PCR primer | PCR primer |
| 1056787 | ACGTTGGATGCATTTCATATTTTGTAGATC | ACGTTGGATGTCTCAGCCCTCTGATAAAAC |
| 1056789 | ACGTTGGATGTGAAGGTTCTGGAGGTATCG | ACGTTGGATGTCTTCTTAGCCAAGTCTGCC |
| CENPC1_ | ACGTTGGATGAACAACGCACAATATCCCCG | ACGTTGGATGGGGTGAGGTTTATGGGAATG |
| SNP1 | | |
| 11250 | ACGTTGGATGAACAACGCACAATATCCCCG | ACGTTGGATGCATTTGCCAAAGTCTTAGGT |
| 1187960 | ACGTTGGATGTGAACCCTTTCAAAATCACCC | ACGTTGGATGTTGTGTTTCATGGGAGGAGG |
| 1187961 | ACGTTGGATGCAACAGATTTTCCCTGTAGAC | ACGTTGGATGTGCATTGACTTCTCCTCAGC |
| 1187974 | ACGTTGGATGGCTGAGCAGAAGCTCTTTCA | ACGTTGGATGTGGGCAAAGACTTCATGATT |
| 1353626 | ACGTTGGATGCAACTACTACCTAGATGATGA | ACGTTGGATGAATAGAAAATCTAAATTGTCTAC |
| 1391110 | ACGTTGGATGAGTATGAAGGTCAGGGTCAG | ACGTTGGATGAAAGAGCACTGACCATGGAG |
| 1403151 | ACGTTGGATGTCAGTCAGAGATCATAGTTC | ACGTTGGATGCATGTAGTGCTTTAACAAATG |
| 1442557 | ACGTTGGATGCAACACATGCACCATTAGCG | ACGTTGGATGGAAGCCACAAACAGATCAGG |
| 1497430 | ACGTTGGATGTTGCTTGCTTGATGATTGGC | ACGTTGGATGTCTTCTGGACTTTAGCACTG |
| 173317 | ACGTTGGATGCTATAGGACTGTAAATTGTAG | ACGTTGGATGTTTTTACACACATGCTGTCA |
| 1825790 | ACGTTGGATGGGCCAACATGGTAAAACTCC | ACGTTGGATGCTGGGATAACAGGTACTTGC |
| 1843831 | ACGTTGGATGTCTCAGCTCATTTCCACCTC | ACGTTGGATGACCTGTAGTCCCAGCTACTC |
| 1843833 | ACGTTGGATGGACCAACATGGTGAAATCTC | ACGTTGGATGTGAGTAGCTGGGACTACAGG |
| 1846060 | ACGTTGGATGAAGATTATCACCGCACTGGG | ACGTTGGATGATCTCCTGACCTCGTGATCC |
| 1874633 | ACGTTGGATGAGGTTTTTGGTATGGTTAGC | ACGTTGGATGGAAAAGGGAGTTGGCCTAAA |
| 1874635 | ACGTTGGATGAGAGAGAGAGAGAGAGAGAG | ACGTTGGATGATGGGCTATAGTGGGATAGG |
| 189579 | ACGTTGGATGACACCAAAAGCAATGGCAAC | ACGTTGGATGGTTGCCTGTTCACTCTGATG |
| 190255 | ACGTTGGATGGAGATCTAGCACATTTATCC | ACGTTGGATGAGGTTGCCTGAAATGCTAAG |
| 191650 | ACGTTGGATGGAGATACCTTTGCTAAGGTG | ACGTTGGATGGGTAGTAATAATGGTACTCC |
| 1962700 | ACGTTGGATGATAAGAGAGAGTGTGGGTGG | ACGTTGGATGATTTCCTGACCTCGTGATCC |
| 2046599 | ACGTTGGATGTATTGAATTCCCTCTGTATG | ACGTTGGATGTCATTCTTTTGAGACTGAAC |
| 2046601 | ACGTTGGATGGCTCCAATGACTAAGTGGAC | ACGTTGGATGGACAGAACACTAAGAGCCTA |
| 2171386 | ACGTTGGATGCTTATCGAAATGAAATCAAG | ACGTTGGATGACAGCTGCAAACCTAAGGAC |
| 2254659 | ACGTTGGATGATCTCTAAGTGAGATAGAGG | ACGTTGGATGCCCAGTCAAATGAAACCCAC |
| 2276945 | ACGTTGGATGGGGAATTCTATATTCCCATTG | ACGTTGGATGCCCAATTCCAACAGAAAATATC |
| 2632450 | ACGTTGGATGTTGAGACAAGCCTAGGCAAC | ACGTTGGATGGTGCTGGGATTACAGGTGTG |
| 2632453 | ACGTTGGATGAAAAGTGAGAGGGCAATAGG | ACGTTGGATGCATAGTAAGTCACCACAAGC |
| 2632454 | ACGTTGGATGTTCTGTGGGTCAGATGTCTC | ACGTTGGATGAGAAACAGACTTCCTCCCAG |
| 2632456 | ACGTTGGATGCCACCATATCAACAGATCAG | ACGTTGGATGCCTGCCAGTATGCTGAGAAT |
| 2646267 | ACGTTGGATGTGAGAAAAAGCACTCCTGGG | ACGTTGGATGAGGCTGAGACAGGAGAATTG |
| 2646268 | ACGTTGGATGCAGGAGAATTGCTTGAACCC | ACGTTGGATGTGAGAAAAAGCACTCCTGGG |
| 2646269 | ACGTTGGATGACCACTATTGTTTCTTTCTC | ACGTTGGATGGGCTAAAGAGTGAAACCCTG |
| 2646282 | ACGTTGGATGGATTGTTTTGAGTCATCTAC | ACGTTGGATGCTGAAATTGACCAGGAAACAC |
| 2646285 | ACGTTGGATGGGTGGATTGGACAAACTTGC | ACGTTGGATGCCTTTTGCTTTTCATTGCTC |
| 2646290 | ACGTTGGATGGATAGCAAGCTACCTAAGAC | ACGTTGGATGCCTCCTTACTCCACTCAATC |
| 2646292 | ACGTTGGATGTTCTGTGGGTCAGATGTCTC | ACGTTGGATGCAAAGAAACAGACTTCCTCC |
| 355465 | ACGTTGGATGTATGAGGTTCTGCCACCAAG | ACGTTGGATGTACCAAATCTGAGGGTAGTC |
| 355466 | ACGTTGGATGCAGGAGCTGCTTAATTCCTC | ACGTTGGATGGATCTTGGGCACTAAGTCTC |
| 355468 | ACGTTGGATGCCTCTCCTCATTTCTGTAAAC | ACGTTGGATGGGCAGGTGGTTAGCATTAAG |
| 355469 | ACGTTGGATGTTGGGATCTAGGCATCAAGG | ACGTTGGATGAGGAGGCACATAATGCTTGG |
| 355470 | ACGTTGGATGACATACACACACACACACAC | ACGTTGGATGGAGACATACACCTCTGCAAC |
| 355471 | ACGTTGGATGCTCATTACAACTTCAGCCAG | ACGTTGGATGACTCAGGACTAAGCTAGTTG |
| 355472 | ACGTTGGATGTCTCTCTCTCTCTCTCTCTC | ACGTTGGATGCAGCCCTTAGTACTCAATGG |
| 355475 | ACGTTGGATGCTGTCTTATCCCAACTTAGA | ACGTTGGATGGTCATGTTACATACCGAAAC |
| 355478 | ACGTTGGATGGGAGGAATCCATATATAGGC | ACGTTGGATGCTGCTGAAGGGAATGAGTAC |
| 355480 | ACGTTGGATGGTTTACAGTCCCACCAACAG | ACGTTGGATGAGTCAGGAAACAACAGGTGC |
| 355481 | ACGTTGGATGATTGCCACACTGTCTTCCAC | ACGTTGGATGGGATGTGGAGAAACAGGAAC |
| 355483 | ACGTTGGATGCCATGTAAGTCTGTCATTTA | ACGTTGGATGAAGTGGTAGCAGAAGTGTGG |
| 355485 | ACGTTGGATGAAGAAGAGGCATGCAAACAG | ACGTTGGATGCTGCGACAAAAGACACATTC |
| 355486 | ACGTTGGATGTGAGAAAAAGCACTCCTGGG | ACGTTGGATGAGGAGAATTGCTTGAACCCG |
| 355487 | ACGTTGGATGCGAGGTAATGAGCAAAGTAAG | ACGTTGGATGGACATTAGGTTCATCTAACCC |
| 355488 | ACGTTGGATGCCAGTTTTCTATGACAAACG | ACGTTGGATGAAAGAGCAGGGACAGCAAAG |
| 355489 | ACGTTGGATGACTCTAGGTATTTTGACTCC | ACGTTGGATGAACTTCCATAGTAGAAAGCC |
| 355490 | ACGTTGGATGAACTTCCATAGTAGAAAGCC | ACGTTGGATGACTCTAGGTATTTTGACTCC |
| 355493 | ACGTTGGATGAGTGGTTTGCTGCACCTATC | ACGTTGGATGGGGAGAGCATTAGGACAAAC |
| 355498 | ACGTTGGATGATGAGAGAGGACACAAAGAG | ACGTTGGATGTTACTTTGCACAGTGTGGCC |
| 355499 | ACGTTGGATGCAATCAAGCAGAAGGATGGG | ACGTTGGATGGGTGTCTTCTTATAGTTGTC |
| 355500 | ACGTTGGATGCAATCAAGCAGAAGGATGGG | ACGTTGGATGGGTGTCTTCTTATAGTTGTC |
| 355508 | ACGTTGGATGGTGTAGATGTGTATCAGGTCA | ACGTTGGATGGTCCACAAAGCATAGCATCC |
| 355510 | ACGTTGGATGCCCTCCTTTTAACCTTTTAGG | ACGTTGGATGTTCTGAGATGATCCTGATGG |
| 355511 | ACGTTGGATGCAGGAGGATATGTGAAAGTC | ACGTTGGATGGTGGATACCAAAATCCAAGG |
| 355513 | ACGTTGGATGTGCTGTATAACAGATTACCC | ACGTTGGATGAACTAGCTAGCTAAGCCTCC |
| 355514 | ACGTTGGATGCCTCAATAGGTTGTTGGAAC | ACGTTGGATGTTGAGTTCATACTATGTGCC |
| 355515 | ACGTTGGATGAGCTCTGCACTCTGACATAC | ACGTTGGATGGTGCAGAGTACTACTTTGCC |
| 355518 | ACGTTGGATGTGCCATGGGGTTGTAAAATC | ACGTTGGATGACACAGAGACCAGCTGAAAG |
| 355519 | ACGTTGGATGGGGAAGAAGCAGATTTTGAG | ACGTTGGATGCATAGGTTGAGAACATCAAGC |
| 3775861 | ACGTTGGATGCCATCTCTTTGAAAATTCCAC | ACGTTGGATGCCCTCAAGTACTTGTTTTGTC |
| 3775862 | ACGTTGGATGTAATGAAGCTGAGTTTATTC | ACGTTGGATGGTTTTTGTTTATTGGTGTCC |
| 3806810 | ACGTTGGATGTCTTTTCTCCCATCATTTCC | ACGTTGGATGACTCAATGGTTGCATGTAGG |
| 3822197 | ACGTTGGATGTGTTTGCTAAAGCTATGCTG | ACGTTGGATGTGAGCATTATGCCTAAGAGC |
| 451344 | ACGTTGGATGCCTTTCTAGATACACTCCAT | ACGTTGGATGCAGCATGTGTGTAAAAATGC |
| 451352 | ACGTTGGATGAGGCAAATTATTTTTGGATG | ACGTTGGATGCTCCCTAAATGGGGAAAAAAG |
| 451362 | ACGTTGGATGCAACACATGCACCATTAGCG | ACGTTGGATGGAAGCCACAAACAGATCAGG |
| 451376 | ACGTTGGATGAGCAGTCTATTCTGGTTCAC | ACGTTGGATGGCCTTTGAGCTTTAAAAATC |
| 451391 | ACGTTGGATGTAAAGTAGGGACTGGGATGG | ACGTTGGATGGCTGTAGAGTAGTGAAACCC |
| 451397 | ACGTTGGATGGTTGCCATATTCAGCAGCTG | ACGTTGGATGCTGTTTCCAGTAGACCTTAG |
| 724199 | ACGTTGGATGCCAGCTAAAACTGCAAATAC | ACGTTGGATGTGGACTCATTTGAGAATATG |
| 768244 | ACGTTGGATGTAAAACCCCTTCCTCATCCC | ACGTTGGATGACCTTTAGCAGCCTGAAACC |

[0299] TABLE 21

| dbSNP | Extend | Term |
|---|---|---|
| rs# | Primer | Mix |
| 355469 | GCACATAATGCTTGGTTGTATT | ACT |
| CENPC1_SNP1 | CTTGACTTTCTACCTTGAA | ACT |
| 11250 | CTCTTGACTTTCTACCTTGAA | ACT |
| 173317 | ACTTAGCGGCTTAAAACAAC | ACT |
| 189579 | CTGTTCACTCTGATGGTAGTTT | CGT |
| 190255 | GTACTATGTGGCAGATGA | ACT |
| 191650 | GGTACTCCTACTTAAAATTTTG | ACT |
| 355465 | GAGGGTAGTCTTGGGAACC | CGT |
| 355466 | CTCTAGTGAGCTTCCCT | ACT |
| 355468 | AGCATTAAGTATTCATGAGAGTTC | CGT |
| 355470 | GGTCTGTTTTATATGTGTGT | ACT |
| 355471 | AGCTAGTTGCTTCAGTAAGT | ACT |
| 355472 | GTACAGTCATAACAGTTGTTAA | CGT |
| 355475 | TACATACCGAAACACATTCC | CGT |
| 355478 | ACATTCTATATGGCCCCUG | ACT |
| 355480 | GGAGAGGATGTGGAGAAA | ACG |
| 355481 | GGTGGGACTGTAAACTA | ACT |
| 355483 | AGAAGTGTGGACACAGTATC | ACT |
| 355485 | CACATTCAACTATACACGCTTTTA | ACT |
| 355486 | GTGAGCCGAAATCGTGCCAC | ACG |
| 355487 | TTCATCTAACCCTTTTCATAA | ACT |
| 355488 | AGCAAAGCTGAAAATGATAA | CGT |
| 355489 | CAATAAATAATAGCAAAGACTGG | ACT |
| 355490 | TGTTTATATTGCTGTTTCTTGA | CGT |
| 355493 | CTCATGTGGGGCTTAAA | CGT |
| 355498 | GTGTGGCCATTTTCACT | ACT |
| 355499 | TGTTAGATAGAGGTTTATCATTTT | ACT |
| 355500 | TTTTTCCTGCAATAGTTTTCT | ACT |
| 355508 | ATACTTATGCTCTGCTACC | ACT |
| 355510 | ATGGTTTTCTTTCTTGTCCTTC | ACG |
| 355511 | GGATGCTCAAGTCCCTTATATA | ACG |
| 355513 | GCCTCCCAGATTGCTGA | ACT |
| 355514 | TGTGCCAAATATTTGCTAGAT | ACT |
| 355515 | ACTACTTTGCCTGTGTGTCA | ACG |
| 355518 | ACCAGCTGAAAGAAAATC | ACT |
| 355519 | AAGCTTAGTATGTCCAAATCTAAC | ACT |
| 451344 | GTGTGTAAAAATGCATTCCAAGTT | ACG |
| 451352 | CCCCCGAAATGTTTCAAAGG | ACG |
| 451362 | CCACAAACAGATCAGGTTGGTG | ACT |
| 451376 | AGTATGTAAAAAGATAGGGAAGA | ACT |
| 451391 | GAGTAGTGAAACCCCTGACC | ACG |
| 451397 | CAGTAGACCTTAGTTTCTTAACC | ACT |
| 724199 | GAGAATATGATAAAAGCTCAGACC | ACG |
| 768244 | GTTTCTGTCTCTGGCGA | ACG |
| 1056787 | GGATACAAGTTATGCTTTGATAG | ACT |
| 1056789 | TCCAATGGCTCACTCAG | ACG |
| 1187960 | GGAGGAGGTCAAAATATCA | ACT |
| 1187961 | GACTTCTCCTCAGCTATGAA | ACG |
| 1187974 | TGATTAAAACACCAAAAGCAATT | ACT |
| 1353626 | AATCTAAATTGTCTACTGAAACT | ACT |
| 1391110 | CCATGGAGTTGTAAGGAA | CGT |
| 1403151 | TAGTGCTTTAACAAATGCTGTCA | CGT |
| 1442557 | CACAAACAGATCAGGTTGGTG | ACT |
| 1497430 | GAATTGGGGAGAGAAAGGGA | ACT |
| 1825790 | CCTGGCAAATTTTGGTATTTTTAG | CGT |
| 1843831 | GCGGGAGAATGGCATGA | ACT |
| 1843833 | GCTCACCACCACACCTG | ACT |
| 1846060 | AAAGTGCTGGGATTACAGG | ACG |
| 1874633 | TGGCCTAAAAATATTTTTACCGT | ACT |
| 1874635 | CAACTGTTTAACAACCAGGC | ACT |
| 1962700 | AGAGTGCTGGGATTACA | ACT |
| 2046599 | CTTTTGAGACTGAACACCTCTA | ACG |
| 2046601 | AGAACACTAAGAGCCTAGAATGG | ACT |
| 2171386 | AGTATGCAGAGACTTACAG | ACT |
| 2254659 | AACCCACCATTCCTATG | ACG |
| 2276945 | CACAAAATACCTCCAAATTTTA | ACG |
| 2632450 | TTACAGGTGTGAGCCAC | ACG |
| 2632453 | CACCACAAGCCACTTGA | ACT |
| 2632454 | CTTCCTCCCAGAGCCAC | ACG |
| 2632456 | TCATAGGTAATGTGGATTTTGT | ACG |
| 2646267 | TTGCTTGAACCCGGGAG | ACT |
| 2646268 | TCGGCTCACTGCAATCTCT | ACT |
| 2646269 | TTCTCGCAAAGAGAAAAC | ACT |
| 2646282 | GGAATTAGCAGTCATTTCTTA | ACG |
| 2646285 | ATTTCTCTAGACTTTGCTACAAT | ACT |
| 2646290 | AGTTCATCCTTCAGGAA | ACT |
| 2646292 | AGACTTCCTCCCAGAGC | ACG |
| 3775861 | GTTTTGTCTTCAAATAGTAAAGA | ACG |
| 3775862 | TCCATTTTTATTTGCAGAAGAC | ACT |
| 3806810 | ATTGGATTTGGCGTAGC | ACT |
| 3822197 | AGCAGTAGGCAACTTCT | ACG |

Genetic Analysis of Allelotyping Results

[0300] Allelotyping results are shown for cases and controls in Table 22. The allele frequency for the A2 allele is noted in the fifth and sixth columns for breast cancer pools and control pools, respectively, where “AF” is allele frequency. The allele frequency for the A1 allele can be easily calculated by subtracting the A2 allele frequency from 1 (A1 AF=1−A2 AF). For example, the SNP rs1874633 has the following case and control allele frequencies: case A1(A)=0.514; case A2(G) =0.486; control A1(A)=0.449; and control A2(G)=0.551, where the nucleotide is provided in paranthesis. SNPs with blank allele frequencies were untyped.

TABLE 22

| dbSNP | Position in | Chromosome | A1/A2 | A2 Case | A2 Control | |
|---|---|---|---|---|---|---|
| rs# | | Position | Allele | AF | AF | p-Value |
| 1874633 | 196 | 68275196 | A/G | 0.486 | 0.551 | 0.0292 |
| 1846060 | 13311 | 68288311 | G/A | 0.416 | 0.468 | 0.0792 |
| 451352 | 14486 | 68289486 | C/T | 0.474 | 0.411 | 0.0365 |
| 355468 | 14691 | 68289691 | A/T | 0.839 | 0.839 | 0.9913 |
| 355469 | 15551 | 68290551 | C/G | 0.089 | 0.072 | 0.3028 |
| 355470 | 17702 | 68292702 | T/C | 0.077 | 0.059 | 0.2261 |
| 355471 | 17872 | 68292872 | T/C | 0.476 | 0.442 | 0.2613 |
| 191650 | 19588 | 68294588 | T/C | 0.122 | 0.103 | 0.3282 |
| 355472 | 19910 | 68294910 | T/A | 0.491 | 0.568 | 0.0114 |
| 1874635 | 20006 | 68295006 | A/C | 0.206 | 0.238 | 0.2083 |
| 1497430 | 20575 | 68295575 | A/G | 0.389 | 0.476 | 0.0039 |
| 2254659 | 21092 | 68296092 | G/A | 0.554 | 0.587 | 0.2664 |
| 3822197 | 22830 | 68297830 | C/T | 0.028 | 0.018 | 0.2999 |
| 2632453 | 23455 | 68298455 | A/G | 0.866 | 0.895 | 0.1407 |
| 2646282 | 23716 | 68298716 | G/A | 0.137 | 0.090 | 0.0146 |
| 2646285 | 23890 | 68298890 | T/G | 0.400 | 0.335 | 0.0269 |
| 768244 | 24001 | 68299001 | C/T | 0.299 | 0.286 | 0.6333 |
| 724199 | 24995 | 68299995 | G/A | 0.446 | 0.374 | 0.0150 |
| 1187960 | 27282 | 68302282 | T/C | 0.071 | 0.060 | 0.4859 |
| 1187961 | 27779 | 68302779 | C/T | 0.499 | 0.549 | 0.0968 |
| 355518 | 29099 | 68304099 | C/G | 0.432 | 0.491 | 0.0473 |
| 355519 | 31185 | 68306185 | A/G | 0.095 | 0.076 | 0.2836 |
| 355511 | 33994 | 68308994 | C/T | 0.450 | 0.361 | 0.0030 |
| 451397 | 34942 | 68309942 | T/C | 0.442 | 0.512 | 0.0210 |
| 355513 | 35137 | 68310137 | C/G | 0.385 | 0.334 | 0.0748 |
| 355514 | 36538 | 68311538 | T/C | 0.423 | 0.479 | 0.0596 |
| 355515 | 37139 | 68312139 | C/T | 0.422 | 0.362 | 0.0395 |
| 1056789 | 37358 | 68312358 | G/A | 0.494 | 0.539 | 0.1409 |
| 2646290 | 38828 | 68313828 | A/G | 0.393 | 0.337 | 0.0559 |
| 190255 | 39469 | 68314469 | T/C | 0.459 | 0.514 | 0.0664 |
| 355466 | 40233 | 68315233 | T/C | 0.404 | 0.468 | 0.0328 |
| 355465 | 40472 | 68315472 | A/T | 0.481 | 0.547 | 0.0281 |
| 2646292 | 41679 | 68316679 | C/T | 0.422 | 0.370 | 0.0820 |
| 2632454 | 41682 | 68316682 | G/A | 0.914 | 0.936 | 0.1705 |
| 1056787 | 42831 | 68317831 | A/G | 0.909 | 0.860 | 0.0112 |
| CENPC1_SNP1 | 42976 | 68317976 | A/G | 0.367 | 0.306 | 0.0322 |
| 173317 | 44128 | 68319128 | A/G | 0.087 | 0.080 | 0.6745 |
| 451344 | 44195 | 68319195 | C/T | 0.366 | 0.307 | 0.0392 |
| 355510 | 46769 | 68321769 | G/A | 0.487 | 0.514 | 0.3645 |
| 355508 | 47363 | 68322363 | G/C | 0.086 | 0.070 | 0.3357 |
| 451391 | 48843 | 68323843 | C/T | 0.440 | 0.370 | 0.0171 |
| 355500 | 52574 | 68327574 | A/G | 0.874 | 0.904 | 0.1103 |
| 355499 | 52602 | 68327602 | A/G | 0.874 | 0.884 | 0.5959 |
| 355498 | 53212 | 68328212 | A/G | 0.477 | 0.528 | 0.0932 |
| 1187974 | 53781 | 68328781 | C/G | 0.563 | 0.540 | 0.4558 |
| 355493 | 54710 | 68329710 | A/T | 0.950 | 0.932 | 0.2013 |
| 2632456 | 55808 | 68330808 | G/A | 0.091 | 0.074 | 0.3234 |
| 1825790 | 57987 | 68332987 | T/A | 0.043 | 0.067 | 0.0709 |
| 355475 | 58556 | 68333556 | C/A | 0.252 | 0.199 | 0.0343 |
| 1391110 | 59148 | 68334148 | T/A | 0.696 | 0.679 | 0.5418 |
| 1442557 | 59286 | 68334286 | G/C | 0.458 | 0.523 | 0.0306 |
| 355478 | 60217 | 68335217 | A/G | 0.314 | 0.371 | 0.0474 |
| 189579 | 60412 | 68335412 | G/T | 0.008 | 0.002 | 0.1543 |
| 355480 | 60753 | 68335753 | C/T | 0.905 | 0.910 | 0.7624 |
| 355481 | 60791 | 68335791 | T/G | 0.974 | 0.979 | 0.5823 |
| 355483 | 61524 | 68336524 | A/G | 0.371 | 0.414 | 0.1461 |
| 355485 | 62543 | 68337543 | T/C | 0.487 | 0.541 | 0.0732 |
| 2646267 | 62825 | 68337825 | A/G | 0.368 | 0.312 | 0.0520 |
| 2646268 | 62826 | 68337826 | A/C | 0.306 | 0.239 | 0.0123 |
| 355486 | 62857 | 68337857 | C/T | 0.438 | 0.375 | 0.0316 |
| 355487 | 63400 | 68338400 | T/C | 0.468 | 0.559 | 0.0031 |
| 355488 | 63960 | 68338960 | T/A | 0.533 | 0.454 | 0.0090 |
| 355489 | 64307 | 68339307 | A/G | 0.367 | 0.324 | 0.1291 |
| 451376 | 64539 | 68339539 | A/G | 0.873 | 0.871 | 0.9287 |
| 1353626 | 65728 | 68340728 | A/G | 0.356 | 0.383 | 0.3657 |
| 2632450 | 66000 | 68341000 | G/A | 0.256 | 0.259 | 0.9210 |
| 2646269 | 66521 | 68341521 | T/G | 0.084 | 0.062 | 0.1648 |
| 2276945 | 68185 | 68343185 | C/T | 0.459 | 0.510 | 0.0866 |
| 3775861 | 69643 | 68344643 | G/A | 0.532 | 0.521 | 0.7150 |
| 1403151 | 74909 | 68349909 | C/A | 0.739 | 0.801 | 0.0148 |
| 1843833 | 82973 | 68357973 | T/G | 0.920 | 0.939 | 0.2355 |
| 1843831 | 83039 | 68358039 | T/C | 0.032 | 0.040 | 0.5196 |
| 3806810 | 85713 | 68360713 | A/G | 0.078 | 0.058 | 0.1942 |
| 3775862 | 86873 | 68361873 | T/C | 0.744 | 0.765 | 0.4224 |
| 1962700 | 90293 | 68365293 | T/G | 0.733 | 0.739 | 0.8308 |
| 2046601 | 91810 | 68366810 | T/G | 0.080 | 0.073 | 0.6571 |
| 2171386 | 92609 | 68367609 | A/G | 0.685 | 0.662 | 0.4056 |
| 2046599 | 92884 | 68367884 | G/A | 0.717 | 0.755 | 0.1540 |
| 355490 | | | A/T | 0.495 | 0.548 | 0.0763 |

[0301] FIG. 16 shows the proximal SNPs in and around the ICAM region for females. The position of each SNP on the chromosome is presented on the x-axis. The y-axis gives the negative logarithm (base 10) of the p-value comparing the estimated allele in the case group to that of the control group. The minor allele frequency of the control group for each SNP designated by an X or other symbol on the graphs in FIG. 16 can be determined by consulting Table 22. By proceeding down the Table from top to bottom and across the graphs from left to right the allele frequency associated with each symbol shown can be determined.

[0302] To aid the interpretation, multiple lines have been added to the graph. The broken horizontal lines are drawn at two common significance levels, 0.05 and 0.01. The vertical broken lines are drawn every 20 kb to assist in the interpretation of distances between SNPs. Two other lines are drawn to expose linear trends in the association of SNPs to the disease. The light gray line (or generally bottom-most curve) is a nonlinear smoother through the data points on the graph using a local polynomial regression method (W. S. Cleveland, E. Grosse and W. M. Shyu (1992) Local regression models. Chapter 8 of Statistical Models in S eds J. M. Chambers and T. J. Hastie, Wadsworth & Brooks/Cole). The black line (or generally top-most curve, e.g., see peak in left-most graph just to the left of position 92150000) provides a local test for excess statistical significance to identify regions of association. This was created by use of a 10 kb sliding window with 1 kb step sizes. Within each window, a chi-square goodness of fit test was applied to compare the proportion of SNPs that were significant at a test wise level of 0.01, to the proportion that would be expected by chance alone (0.05 for the methods used here). Resulting p-values that were less than 10⁻⁸ were truncated at that value.

[0303] Finally, the gene or genes present in the loci region of the proximal SNPs as annotated by Locus Link (http address: www.ncbi.nlm.nih.gov/LocusLink/) are provided on the graph. The exons and introns of the genes in the covered region are plotted below each graph at the appropriate chromosomal positions. The gene boundary is indicated by the broken horizontal line. The exon positions are shown as thick, unbroken bars. An arrow is place at the 3′ end of each gene to show the direction of transcription.

[0304] Additional Genotyping

[0305] In addition to the CENCP1 incident SNP, another SNP (rs1056787) was genotyped in the discovery cohort and found to be significantly associated with breast cancer with a p-value of 0.0266. See Table 25.

[0306] The methods used to verify and genotype the proximal SNP of Table 15 are the same methods described in Examples 1 and 2 herein. The PCR primers and extend primers used in these assays are provided in Table 11 and Table 12, respectively.

TABLE 23

| | | |
|---|---|---|
| dbSNP | Second | First |
| rs# | PCR primer | PCR primer |

| | | |
|---|---|---|
| 1056787 | ACGTTGGATGCATTTCATATTTTGTAGATC | ACGTTGGATGTCTCAGCCCTCTGATAAAAC |

[0307] TABLE 24

| | | |
|---|---|---|
| dbSNP | Extend | Term |
| rs# | Primer | Mix |

| | | |
|---|---|---|
| 1056787 | GGATACAAGTTATGCTTTGATAG | ACT |

[0308] Table 13, below, shows the case and control allele frequencies along with the p-values for the SNPs genotyped. The disease associated allele of column 4 is in bold and the disease associated amino acid of column 5 is also in bold. The chromosome position provided corresponds to NCBI's Build 33.

TABLE 25
Genotpying Results

| | | Chromo- | | Amino | | | | |
|---|---|---|---|---|---|---|---|---|
| dbSNP | Position in | some | Alleles | Acid | AF | AF | | Odds |
| rs# | | Position | (A1/A2) | Change | F case | F control | p-value | Ratio |
| 1056787 | 42831 | 68317831 | A/G | D389G | A = 0.030 | A = 0.110 | 0.0266 | 1.640 |
| | | | | | G = 0.970 | G = 0.890 | | |

### Example 7

### In Vitro Production of Target Polypeptides

[0309] cDNA is cloned into a pIVEX 2.3-MCS vector (Roche Biochem) using a directional cloning method. A cDNA insert is prepared using PCR with forward and reverse primers having 5′ restriction site tags (in frame) and 5-6 additional nucleotides in addition to 3′ gene-specific portions, the latter of which is typically about twenty to about twenty-five base pairs in length. A Sal I restriction site is introduced by the forward primer and a Sma I restriction site is introduced by the reverse primer. The ends of PCR products are cut with the corresponding restriction enzymes (i.e., Sal I and Sma I) and the products are gel-purified. The pIVEX 2.3-MCS vector is linearized using the same restriction enzymes, and the fragment with the correct sized fragment is isolated by gel-purification. Purified PCR product is ligated into the linearized pIVEX 2.3-MCS vector and E. coli cells transformed for plasmid amplification. The newly constructed expression vector is verified by restriction mapping and used for protein production.

[0310] E. coli lysate is reconstituted with 0.25 ml of Reconstitution Buffer, the Reaction Mix is reconstituted with 0.8 ml of Reconstitution Buffer; the Feeding Mix is reconstituted with 10.5 ml of Reconstitution Buffer; and the Energy Mix is reconstituted with 0.6 ml of Reconstitution Buffer. 0.5 ml of the Energy Mix was added to the Feeding Mix to obtain the Feeding Solution. 0.75 ml of Reaction Mix, 50 μl of Energy Mix, and 10 μg of the template DNA is added to the E. coli lysate.

[0311] Using the reaction device (Roche Biochem), 1 ml of the Reaction Solution is loaded into the reaction compartment. The reaction device is turned upside-down and 10 ml of the Feeding Solution is loaded into the feeding compartment. All lids are closed and the reaction device is loaded into the RTS500 instrument. The instrument is run at 30° C. for 24 hours with a stir bar speed of 150 rpm. The pIVEX 2.3 MCS vector includes a nucleotide sequence that encodes six consecutive histidine amino acids on the C-terminal end of the target polypeptide for the purpose of protein purification. Target polypeptide is purified by contacting the contents of reaction device with resin modified with Ni²⁺ ions. Target polypeptide is eluted from the resin with a solution containing free Ni²⁺ ions.

### Example 8

### Cellular Production of Target Polypeptides

[0312] Nucleic acids are cloned into DNA plasmids having phage recombination cites and target polypeptides are expressed therefrom in a variety of host cells. Alpha phage genomic DNA contains short sequences known as attP sites, and E. coli genomic DNA contains unique, short sequences known as attB sites. These regions share homology, allowing for integration of phage DNA into E. coli via directional, site-specific recombination using the phage protein Int and the E. coli protein IHF. Integration produces two new att sites, L and R, which flank the inserted prophage DNA. Phage excision from E. coli genomic DNA can also be accomplished using these two proteins with the addition of a second phage protein, Xis. DNA vectors have been produced where the integration/excision process is modified to allow for the directional integration or excision of a target DNA fragment into a backbone vector in a rapid in vitro reaction (Gateway™ Technology (Invitrogen, Inc.)).

[0313] A first step is to transfer the nucleic acid insert into a shuttle vector that contains attL sites surrounding the negative selection gene, ccdB (e.g. pENTER vector, Invitrogen, Inc.). This transfer process is accomplished by digesting the nucleic acid from a DNA vector used for sequencing, and to ligate it into the multicloning site of the shuttle vector, which will place it between the two attL sites while removing the negative selection gene ccdB. A second method is to amplify the nucleic acid by the polymerase chain reaction (PCR) with primers containing attB sites. The amplified fragment then is integrated into the shuttle vector using Int and IHF. A third method is to utilize a topoisomerase-mediated process, in which the nucleic acid is amplified via PCR using gene-specific primers with the 5′ upstream primer containing an additional CACC sequence (e.g., TOPO® expression kit (Invitrogen, Inc.)). In conjunction with Topoisomerase I, the PCR amplified fragment can be cloned into the shuttle vector via the attL sites in the correct orientation.

[0314] Once the nucleic acid is transferred into the shuttle vector, it can be cloned into an expression vector having attR sites. Several vectors containing attR sites for expression of target polypeptide as a native polypeptide, N-fusion polypeptide, and C-fusion polypeptides are commercially available (e.g., pDEST (Invitrogen, Inc.)), and any vector can be converted into an expression vector for receiving a nucleic acid from the shuttle vector by introducing an insert having an attR site flanked by an antibiotic resistant gene for selection using the standard methods described above. Transfer of the nucleic acid from the shuttle vector is accomplished by directional recombination using Int, IHF, and Xis (LR clonase). Then the desired sequence can be transferred to an expression vector by carrying out a one hour incubation at room temperature with Int, IHF, and Xis, a ten minute incubation at 37° C. with proteinase K, transforming bacteria and allowing expression for one hour, and then plating on selective media. Generally, 90% cloning efficiency is achieved by this method. Examples of expression vectors are pDEST 14 bacterial expression vector with att7 promoter, pDEST 15 bacterial expression vector with a T7 promoter and a N-terminal GST tag, pDEST 17 bacterial vector with a T7 promoter and a N-terminal polyhistidine affinity tag, and pDEST 12.2 mammalian expression vector with a CMV promoter and neo resistance gene. These expression vectors or others like them are transformed or transfected into cells for expression of the target polypeptide or polypeptide variants. These expression vectors are often transfected, for example, into murine-transformed a adipocyte cell line 3T3-L1, (ATCC), human embryonic kidney cell line 293, and rat cardiomyocyte cell line H9C2.

### Example 9

### Haplotype Analysis of the KIAA0783 Locus

[0315] Markers rs1681290, rs220097, rs3801435, and rs2883140 are significantly associated with breast cancer at the allele and genotype levels (P<0.05). Strong LD is observed between markers 1681290, 220097, 3801435, and 2883140 (r²>0.90). Pearson chi-squared statistics indicate that haplotypes are significantly associated with breast cancer. Haplotypes TTGCGG, CTGCGG, and TCATAT contribute most to the aggregate test statistic. Odds ratios and score tests indicate that individuals with the TTGCGG and CTGCGG haplotypes are significantly less likely to have breast cancer, while individuals with the TCATAT haplotype are slightly more likely to be affected than individuals with other haplotypes.

[0316] Statistics

[0317] Chi-squared statistics are estimated to assess whether 1) alleles and genotypes are associated with breast cancer status and 2) marker genotype frequencies deviate significantly from Hardy-Weinberg equilibrium (HWE). Haplotype frequencies and relative frequencies are estimated, as well as several statistics (r², D′, and p-value) that gauge the extent and stability of linkage disequilibrium between markers in each region. Chi-squared statistics and score tests are estimated to determine whether reconstructed haplotypes are significantly associated with breast cancer status (P<0.05). P-values are estimated for 1) the full set of reconstructed haplotypes and 2) a reduced set that excludes haplotypes with observed frequencies less than 10. Results are presented by chromosome order.

Results

[0318] Summary Statistics: Alleles and Genotypes

### SNP Locations

[0319]

| SNP.ID | Type | Location |
|---|---|---|
| 218981 | Proximal | 10720511 |
| 1681284 | Proximal | 10739011 |
| 1681290 | Proximal | 10741656 |
| 220097 | Incident | 10759860 |
| 3801435 | Proximal | 10771563 |
| 2883140 | Proximal | 10806368 |

### Allele by GYNGroup

[0320]

| | | Case | Control | Test |
|---|---|---|---|---|
| | N | (N = 510) | (N = 538) | Statistic |
| 218981: T | 1028 | 47%(232) | 45%(239) | Chi-square = 0.68 |
| | | | | d.f. = 1 P = 0.41 |
| 1681284: C | 1032 | 56%(276) | 50%(267) | Chi-square = 3.51 |
| | | | | d.f. = 1 P = 0.0608 |
| 1681290: A | 1018 | 72%(352) | 63%(330) | Chi-square = 8.92 |
| | | | | d.f. = 1 = 0.00282 |
| 220097: C | 996 | 29%(139) | 38%(196) | Chi-square = 8.03 |
| | | | | d.f. = 1 P = 0.00461\| |
| 3801435: G | 1018 | 28%(138) | 38%(200) | Chi-square = 9.69 |
| | | | | d.f. = 1 P = 0.00185\| |
| 2883140: T | 1012 | 73%(351) | 62%(330) | Chi-square = 12.78 |
| | | | | d.f. = 1 P < 0.001\| |

[0321] Genotype by GYNGroup

| | | Case | Control | Test |
|---|---|---|---|---|
| | N | (N = 255) | (N = 269) | Statistic |
| 218981: CC | 514 | 27%(67) | 27%(73) | Chi-square = 2.41 |
| | | | | d.f. = 2 P = 0.299 |
| CT | | 51%(126) | 56%(151) | |
| TT | | 22%(53) | 16%(44) | |
| 1681284: TT | 516 | 19%(48) | 26%(70) | Chi-square = 3.77 |
| | | | | d.f. = 2 P = 0.152 |
| TC | | 50%(124) | 48%(129) | |
| CC | | 31%(76) | 26%(69) | |
| 1681290: GG | 509 | 9%(21) | 16%(41) | Chi-square = 8.64 |
| | | | | d.f. = 2 P = 0.0133 |
| GA | | 40%(98) | 43%(114) | |
| AA | | 52%(127) | 41%(108) | |
| 220097: TT | 498 | 50%(119) | 40%(104) | Chi-square = 8.06 |
| | | | | d.f. = 2 P = 0.0177 |
| TC | | 42%(99) | 45%(116) | |
| CC | | 8%(20) | 15%(40) | |
| 3801435: AA | 509 | 51%(124) | 40%(107) | Chi-square = 9.78 |
| | | | | d.f. = 2 P = 0.0075 |
| AG | | 41%(100) | 44%(118) | |
| GG | | 8%(19) | 15%(41) | |
| 2883140: GG | 506 | 8%(19) | 16%(42) | Chi-square = 12.14 |
| | | | | d.f. = 2 P = 0.00231 |
| GT | | 39%(93) | 44%(116) | |
| TT | | 54%(129) | 40%(107) | |

Genotype QC: Test of Hardy-Weinberg Proportions

### All

[0322]

| | A.freq | D | ChiSq | Pvalue |
|---|---|---|---|---|
| 218981 | 0.543 | −0.01990 | 3.290 | 0.0697 |
| 1681284 | 0.526 | 0.00564 | 0.263 | 0.6080 |
| 1681290 | 0.670 | 0.01170 | 1.430 | 0.2320 |
| 220097 | 0.664 | 0.00584 | .351 | .5530 |
| 3801435 | 0.667 | 0.00585 | .355 | .5510 |
| 2883140 | 0.675 | .01360 | .970 | .1610 |

### Control

[0323]

| | A.freq | D | ChiSq | Pvalue |
|---|---|---|---|---|
| 218981 | 0.554 | −0.03380 | 5.010 | 0.0252 |
| 1681284 | 0.502 | 0.01030 | 0.453 | 0.5010 |
| 1681290 | 0.627 | 0.01470 | 1.050 | 0.3050 |
| 220097 | 0.620 | 0.00904 | 0.393 | 0.5310 |
| 3801435 | 0.624 | 0.01190 | 0.684 | 0.4080 |
| 2883140 | 0.625 | 0.01700 | 1.410 | 0.2350 |

Summary Statistics Linkage Disequilibrium

### PHASE Haplotype Frequencies

[0324]

| | H.freq | H.relfreq |
|---|---|---|
| CCATAT | 91 | 0.089 |
| CCGCGG | 4 | 0.004 |
| CTACGG | 5 | 0.005 |
| CTACGT | 1 | 0.001 |
| CTATAT | 142 | 0.138 |
| CTGCAG | 1 | 0.001 |
| CTGCAT | 2 | 0.002 |
| CTGCGG | 300 | 0.292 |
| CTGCGT | 10 | 0.010 |
| CTGTAT | 1 | 0.001 |
| TCACGG | 1 | 0.001 |
| TCATAG | 1 | 0.001 |
| TCATAT | 443 | 0.432 |
| TTATAT | 3 | 0.003 |
| TTGCGG | 21 | 0.020 |

[0325] Linkage Disequilibrium Between Markers

| x | 218981 | 1681284 | 1681290 | 220097 | 3801435 | 2883140 |
|---|---|---|---|---|---|---|
| 218981 | 1.000 | 0.603 | 0.311 | 0.316 | 0.311 | 0.292 |
| 1681284 | 0.603 | 1.000 | 0.524 | 0.532 | 0.525 | 0.498 |
| 1681290 | 0.311 | 0.524 | 1.000 | 0.965 | 0.952 | 0.914 |
| 220097 | 0.316 | 0.532 | 0.965 | 1.000 | 0.987 | 0.940 |
| 3801435 | 0.311 | 0.525 | 0.952 | 0.987 | 1.000 | 0.944 |
| 2883140 | 0.292 | 0.498 | 0.914 | 0.940 | 0.944 | 1.000 |

### D′

[0326]

| | 218981 | 1681284 | 1681290 | 220097 | 3801435 | 2883140 |
|---|---|---|---|---|---|---|
| 218981 | 1.000 | 0.803 | 0.728 | 0.725 | 0.724 | 0.715 |
| 1681284 | 0.803 | 1.000 | 0.978 | 0.972 | 0.972 | 0.966 |
| 1681290 | 0.728 | 0.978 | 1.000 | 0.996 | 0.982 | 0.969 |
| 220097 | 0.725 | 0.972 | 0.996 | 1.000 | 1.000 | 0.995 |
| 3801435 | 0.724 | 0.972 | 0.982 | 1.000 | 1.000 | 0.991 |
| 2883140 | 0.715 | 0.966 | 0.969 | 0.995 | 0.991 | 1.000 |

### P-Value

[0327]

| | 218981 | 1681284 | 1681290 | 220097 | 3801435 | 2883140 |
|---|---|---|---|---|---|---|
| 218981 | 1 | 0 | 0 | 0 | 0 | 0 |
| 1681284 | 0 | 1 | 0 | 0 | 0 | 0 |
| 1681290 | 0 | 0 | 1 | 0 | 0 | 0 |
| 220097 | 0 | 0 | 0 | 1 | 0 | 0 |
| 3801435 | 0 | 0 | 0 | 0 | 1 | 0 |
| 2883140 | 0 | 0 | 0 | 0 | 0 | 1 |

Haplotype by GYNGroup

### All Haplotypes

[0328]

| | Case | Case(%) | Case.X\hat{ }2 | Control | Control(%) | Control.X\hat{ }2 | OR | In.OR |
|---|---|---|---|---|---|---|---|---|
| CTGCAG | 0 | 0.00 | 0.48 | 1 | 0.10 | 0.44 | 0.0000 | −Inf |
| TCACGG | 0 | 0.00 | 0.48 | 1 | 0.10 | 0.44 | −Inf | |
| | | | | | | 0.0000 | | |
| TCATAG | 0 | 0.00 | 0.48 | 1 | 0.10 | 0.44 | 0.0000 | −Inf |
| TTATAT | 0 | 0.00 | 1.44 | 3 | 0.29 | 1.33 | 0.0000 | −Inf |
| TTGCGG | 1 | 0.10 | 8.17 | 20 | 1.95 | 7.53 | 0.0491 | −3.0139 |
| CCGCGG | 1 | 0.10 | 0.44 | 3 | 0.29 | 0.40 | 0.3327 | −1.1005 |
| CTACGG | 2 | 0.19 | 0.07 | 3 | 0.29 | 0.06 | 0.6660 | −0.4065 |
| CTGCGG | 129 | 12.57 | 1.53 | 171 | 16.67 | 1.41 | 0.7191 | −0.3298 |
| CCATAT | 43 | 4.19 | 0.01 | 48 | 4.68 | 0.01 | 0.8913 | −0.1151 |
| CTGCAT | 1 | 0.10 | 0.00 | 1 | 0.10 | 0.00 | 1.0000 | 0.0000 |
| TCATAT | 230 | 22.42 | 1.45 | 213 | 20.76 | 1.34 | 1.1029 | 0.0979 |
| CTATAT | 76 | 7.41 | 0.92 | 66 | 6.43 | 0.85 | 1.1636 | 0.1515 |
| CTGCGT | 7 | 0.68 | 1.01 | 3 | 0.29 | 0.93 | 2.3425 | 0.8512 |
| CTACGT | 1 | 0.10 | 0.56 | 0 | 0.00 | 0.52 | Inf | Inf |
| CTGTAT | 1 | 0.10 | 0.56 | 0 | 0.00 | 0.52 | Inf | Inf |

Pearson Chi-squared Test=33.8392, DF=14, P-value=0.002177 Permutation Test P-value=0.01

### PHASE Haplotypes (Low Frequency Excluded)

[0329]

| | Case | Case(%) | Case.X\hat{ }2 | Control | Control(%) | Control.X\hat{ }2 | OR | In.OR |
|---|---|---|---|---|---|---|---|---|
| TTGCGG | 1 | 0.10 | 8.23 | 20 | 1.99 | 7.68 | 0.0491 | −3.0139 |
| CTGCGG | 129 | 12.81 | 1.72 | 171 | 16.98 | 1.61 | 0.7183 | −0.3309 |
| CCATAT | 43 | 4.27 | 0.02 | 48 | 4.77 | 0.02 | 0.8912 | −0.1152 |
| TCATAT | 230 | 22.84 | 1.23 | 213 | 21.15 | 1.14 | 1.1034 | 0.0984 |
| CTATAT | 76 | 7.55 | 0.81 | 66 | 6.55 | 0.76 | 1.1639 | 0.1518 |
| CTGCGT | 7 | 0.70 | 0.98 | 3 | 0.30 | 0.91 | 2.3427 | 0.8513 |

Pearson Chi-squared Test=25.1157, DF=5, P-value=0.0001323

### Haplo.Score Haplotypes

[0330]

| | Hap.Freq | Score | P.X\hat{ }2 | P.Sim |
|---|---|---|---|---|
| TTGCGG | 0.0203 | −3.7664 | 0.0002 | 0.0001 |
| TTATAT | 0.0063 | −2.5040 | 0.0123 | 0.0097 |
| CTGCGG | 0.2947 | −2.0103 | 0.0444 | 0.0438 |
| CCATAT | 0.0902 | −0.3982 | 0.6905 | 0.7174 |
| CTATAT | 0.1318 | 1.4254 | 0.1540 | 0.1538 |
| CTGCGT | 0.0084 | 1.5778 | 0.1146 | 0.1243 |
| TCATAT | 0.4342 | 2.3889 | 0.0169 | 0.0180 |

Global Score=27.2432, DF=7, Global P.X\hat{ }2=3e-04, Global P.Sim=1e−04

### Example 10

### Haplotype Analysis of the CENPC1 Locus

[0331] Each SNP noted below is significantly associated with breast cancer at allele level (P<0.05). rs355510 maintains a significant relationship with disease at the genotype level. Near-complete LD is observed across the entire region. Pearson chi-squared statistics demonstrate that haplotypes CCAC and TTGT are significantly associated with breast cancer after low frequency haplotypes are removed from the analysis. Odds ratios and score tests indicate that individuals with the CCAC haplotype are significantly less likely to have breast cancer, while individuals with the TTGT haplotype are at moderately increased risk for disease vs. individuals with other haplotypes.

[0332] Statistics

[0333] Chi-squared statistics are estimated to assess whether 1) alleles and genotypes are associated with breast cancer status and 2) marker genotype frequencies deviate significantly from Hardy-Weinberg equilibrium (HWE). Haplotype frequencies and relative frequencies are estimated, as well as several statistics (r², D′, and p-value) that gauge the extent and stability of linkage disequilibrium between markers in each region. Chi-squared statistics and score tests are estimated to determine whether reconstructed haplotypes are significantly associated with breast cancer status (P<0.05). P-values are estimated for 1) the full set of reconstructed haplotypes and 2) a reduced set that excludes haplotypes with observed frequencies less than 10. Results are presented by chromosome order.

Results

Summary Statistics: Alleles and Genotypes

### SNP Locations

[0334]

| SNP.ID | Type | Location |
|---|---|---|
| GP04.071927035 | Proximal | 68289486 |
| 355511 | Proximal | 68308994 |
| 355510 | Incident | 68321769 |
| 355487 | Proximal | 68338400 |

### Allele by GYNGroup

[0335]

| | | Case | Control | |
|---|---|---|---|---|
| | N | (N = 508) | (N = 536) | Test Statistic |
| GP04.071927035: T | 1022 | 46% (225) | 39% (207) | Chi-square = 5.13 |
| | | | | d.f. = 1 P = 0.0235 |
| 355511: C | 1010 | 55% (264) | 61% (321) | Chi-square = 4.34 |
| | | | | d.f. = 1 P = 0.0371 |
| 355510: A | 1004 | 54% (261) | 62% (321) | Chi-square = 6.27 |
| | | | | d.f. = 1 P = 0.0123 |
| 355487: C | 992 | 54% (262) | 61% (311) | Chi-square = 5.1 |
| | | | | d.f. = 1 P = 0.0239 |

### Genotype by GYNGroup

[0336]

| | | Case | Control | |
|---|---|---|---|---|
| | N | (N = 254) | (N = 268) | Test Statistic |
| GP04.071927035: CC | 511 | 28%(69) | 37%(98) | Chi-square = 5.33 d.f. = 2 P = 0.0695 |
| CT | | 52%(127) | 48%(129) | |
| TT | | 20%(49) | 15%(39) | |
| 355511: TT | 505 | 20%(48) | 14%(38) | Chi-square = 4.47 d.f. = 2 P = 0.107 |
| TC | | 51%(124) | 49%(129) | |
| CC | | 29%(70) | 37%(96) | |
| 355510: GG | 502 | 20%(49) | 15%(38) | Chi-square = 6.52 d.f. = 2 P = 0.0383 |
| GA | | 52%(125) | 47%(123) | |
| AA | | 28%(68) | 38%(99) | |
| 355487: TT | 496 | 20%(48) | 15%(37) | Chi-square = 5.35 d.f. = 2 P = 0.069 |
| TC | | 52%(126) | 48%(123) | |
| CC | | 28%(68) | 37%(94) | |

Genotype QC: Test of Hardy-Weinberg Proportions

### All

[0337]

| | A.freq | D | ChiSq | Pvalue |
|---|---|---|---|---|
| GP04.071927035 | 0.577 | −0.00599 | 0.303 | 0.582 |
| 355511 | 0.579 | −0.00630 | 0.337 | 0.562 |
| 355510 | 0.577 | −0.00599 | 0.303 | 0.582 |
| 355487 | 0.577 | −0.00599 | 0.303 | 0.582 |

### Control

[0338]

| | A.freq | D | ChiSq | Pvalue |
|---|---|---|---|---|
| GP04.071927035 | 0.609 | −0.00420 | 0.0814 | 0.775 |
| 355511 | 0.611-0.00653 | 0.1970 | 0.657 | |
| 355510 | 0.609 | −0.00420 | 0.0814 | 0.775 |
| 355487 | 0.611 | −0.00271 | 0.0340 | 0.854 |

Summary Statics: Linkage Disequilibrium

### PHASE Haplotype Frequencies

[0339]

| | H.freq | H.relfreq |
|---|---|---|
| CCAC | 581 | 0.576 |
| CCAT | 1 | 0.001 |
| TCGT | 2 | 0.002 |
| TTGC | 1 | 0.001 |
| TTGT | 423 | 0.420 |

Linkage Disequilibrium Between Markers

### r²

[0340]

| | GP04.071927035 | 355511 | 355510 | 355487 |
|---|---|---|---|---|
| GP04.071927035 | 1.000 | 0.992 | 1.000 | 0.992 |
| 355511 | 0.992 | 1.000 | 0.992 | 0.984 |
| 355510 | 1.000 | 0.992 | 1.000 | 0.992 |
| 355487 | 0.992 | 0.984 | 0.992 | 1.000 |

### D′

[0341]

| | GP04.071927035 | 355511 | 355510 | 355487 |
|---|---|---|---|---|
| GP04.071927035 | 1.000 | 1.000 | 1.000 | 0.996 |
| 355511 | 1.000 | 1.000 | 1.000 | 0.996 |
| 355510 | 1.000 | 1.000 | 1.000 | 0.996 |
| 355487 | 0.996 | 0.996 | 0.996 | 1.000 |

### P-Value

[0342]

| | GP04.071927035 | 355511 | 355510 | 355487 |
|---|---|---|---|---|
| GP04.071927035 | 1 | 0 | 0 | 0 |
| 355511 | 0 | 1 | 0 | 0 |
| 355510 | 0 | 0 | 1 | 0 |
| 355487 | 0 | 0 | 0 | 1 |

Haplotype by GYNGroup

### PHASE Haplotypes (All)

[0343]

| | Case | Case(%) | Case.X\hat{ }2 | Control | Control(%) | Control.X\hat{ }2 | OR | In.OR |
|---|---|---|---|---|---|---|---|---|
| TTGC | 0 | 0.00 | 0.48 | 1 | 0.10 | 0.44 | 0.0000 | −Inf |
| CCAC | 262 | 25.99 | 1.03 | 319 | 31.65 | 0.95 | 0.7586 | −0.2763 |
| TCGT | 1 | 0.10 | 0.00 | 1 | 0.10 | 0.00 | 1.0000 | 0.0000 |
| TTGT | 220 | 21.83 | 1.41 | 203 | 20.14 | 1.30 | 1.1071 | 0.1017 |
| CCAT | 1 | 0.10 | 0.56 | 0 | 0.00 | 0.52 | Inf | Inf |

Pearson Chi-squared Test=6.6985, DF=4, P-value=0.1527 Permutation Test P-value=0.56

### PHASE Haplotypes (Low Frequency Excluded)

[0344]

| | Case | Case(%) | Case.X\hat{ }2 | Control | Control(%) | Control.X\hat{ }2 | OR | In.OR |
|---|---|---|---|---|---|---|---|---|
| CCAC | 262 | 26.10 | 1.03 | 319 | 31.77 | 0.95 | 0.7582 | −0.2768 |
| TTGT | 220 | 21.91 | 1.41 | 203 | 20.22 | 1.30 | 1.1072 | 0.1018 |

Pearson Chi-squared Test=4.4162, DF=1, P-value=0.0356

### Haplo.Score Haplotypes

[0345]

| | Hap.Freq | Score | P.X\hat{ }2 | P.Sim |
|---|---|---|---|---|
| CCAC | 0.5772 | −2.3513 | 0.0187 | 0.0168 |
| TTGT | 0.4208 | 2.2111 | 0.0270 | 0.0249 |

Global Score=7.5085, DF=2, Global P.X\hat{ }2=0.0234, Global P.Sim=0.0117

[0346] Citation of the above publications or documents is not intended as an admission that any of the following is pertinent prior art, nor does it constitute any admission as to the contents or date of these publications or documents. U.S. patents and other publications referenced herein are hereby incorporated by reference.

[0347] Modifications may be made to the foregoing without departing from the basic aspects of the invention. Although the invention has been described in substantial detail with reference to one or more specific embodiments, those of skill in the art will recognize that changes may be made to the embodiments specifically disclosed in this application, yet these modifications and improvements are within the scope and spirit of the invention, as set forth in the claims which follow. All publications or patent documents cited in this specification are incorporated herein by reference as if each such publication or document was specifically and individually indicated to be incorporated herein by reference.

1. A method for identifying a subject at risk of breast cancer, which comprises detecting the presence or absence of one or more polymorphic variations associated with breast cancer in a nucleic acid sample from a subject, wherein the one or more polymorphic variations are detected in a nucleotide sequence selected from the group consisting of:
(a) a nucleotide sequence in SEQ ID NO: 1-4;
(b) a nucleotide sequence which encodes a polypeptide encoded by a nucleotide sequence in SEQ ID NO: 1-4;
(c) a nucleotide sequence which encodes a polypeptide that is 90% or more identical to the amino acid sequence encoded by a nucleotide sequence in SEQ ID NO: 1-4;
(d) a fragment of a nucleotide sequence of (a), (b), or (c);
whereby the presence of the polymorphic variation is indicative of the subject being at risk of breast cancer.

2. The method of claim 1, which further comprises obtaining the nucleic acid sample from the subject.

3. The method of claim 1, wherein the one or more polymorphic variations are detected at one or more positions in SEQ ID NO: 1 selected from the group consisting of 133, 7938, 8873, 13221, 17288, 25732, 26923, 39977, 41284, 41410, 41477, 41514, 42606, 42742, 59515, 59808, 60265, 67152, 68332, 71128 and 76427.

4. The method of claim 1, wherein the one or more polymorphic variations are detected at one or more positions in SEQ ID NO: 1 selected from the group consisting of 7938, 26923, 39977 and 59808.

5. The method of claim 1, wherein the one or more polymorphic variations are detected at one or more positions in a region spanning positions 7938-59808 in SEQ ID NO: 1.

6. The method of claim 1, wherein the one or more polymorphic variations are detected at one or more positions in SEQ ID NO: 2 selected from the group consisting of 201, 6395, 8558, 9429, 9809, 10072, 10511, 11556, 16857, 16951, 17027, 17177, 17615, 17950, 18329, 18384, 18561, 18579, 18871, 27152, 27306, 28091, 28661, 29011, 29962, 29969, 30085, 31656, 31685, 31749, 45389, 45459, 46647, 49860, 53061, 57308, 61563, 61660, 62212, 67090, 67198, 70071, 70191, 74006, 75600, 85761, 90798, 90883, 91259, 95416, 95446, 96368, 97050, 97362, 97630, 97989 and 98107.

7. The method of claim 1, wherein the one or more polymorphic variations are detected at one or more positions in SEQ ID NO: 2 selected from the group consisting of 10511, 11556, 17177, 18384, 28661, 31656, 31685, 31749, 45389, 45459, 46647, 49860, 53061, 57308, 61563, 61660, 67090, 67198, 70071, 74006, 75600, 85761, 90798, 90883, 91259, 95416, 95446, 96368, 97362, 97630, 97989 and 98107.

8. The method of claim 1, wherein the one or more polymorphic variations are detected at one or more positions in a region spanning positions 10511-98107 in SEQ ID NO: 2.

9. The method of claim 1, wherein the one or more polymorphic variations are detected at one or more positions in SEQ ID NO: 3 selected from the group consisting of 160, 6053, 9719, 10481, 10676, 17179, 18561, 18658, 18694, 18858, 24582, 24683, 24767, 27402, 28150, 28494, 32003, 35588, 35619, 35856, 36254, 37314, 40033, 40095, 42593, 42799, 43090, 46683, 49774, 51796, 52079, 53857, 53971, 55899, 60682, 61291, 72720, 72752, 85507 and 89751.

10. The method of claim 1, wherein the one or more polymorphic variations are detected at one or more positions in SEQ ID NO: 3 selected from the group consisting of 160, 6053, 18658, 18694, 18858, 24683, 27402, 28494, 32003, 35588, 35856, 40095, 46683, 52079, 53857, 72720 and 72752.

11. The method of claim 1, wherein the one or more polymorphic variations are detected at one or more positions in a region spanning positions 160-72752 in SEQ ID NO: 3.

12. The method of claim 1, wherein the one or more polymorphic variations are detected at one or more positions in SEQ ID NO: 4 selected from the group consisting of 196, 13311, 14486, 14691, 15551, 17702, 17872, 19588, 19910, 20006, 20575, 21092, 22830, 23455, 23716, 23890, 24001, 24995, 27282, 27779, 29099, 31185, 33994, 34942, 35137, 36538, 37139, 37358, 38828, 39469, 40233, 40472, 41679, 41682, 42831, 42976, 44128, 44195, 46769, 47363, 48843, 52574, 52602, 53212, 53781, 54710, 55808, 57987, 58556, 59148, 59286, 60217, 60412, 60753, 60791, 61524, 62543, 62825, 62826, 62857, 63400, 63960, 64307, 64539, 65728, 66000, 66521, 68185, 69643, 74909, 82973, 83039, 85713, 86873, 90293, 91810, 92609, 92884 and 42831.

13. The method of claim 1, wherein the one or more polymorphic variations are detected at one or more positions in SEQ ID NO: 4 selected from the group consisting of 196, 13311, 14486, 19910, 20575, 23716, 23890, 24995, 29099, 33994, 34942, 37139, 40233, 40472, 42831, 42976, 44195, 48843, 58556, 59286, 60217, 62826, 62857, 63400, 63960 and 74909.

14. The method of claim 1, wherein the one or more polymorphic variations are detected at one or more positions in a region spanning positions 196-74909 in SEQ ID NO: 4.

15. The method of claim 1, wherein the one or more polymorphic variations are detected at one or more positions in linkage disequilibrium with one or more positions in claim 3, 6, 9 or 12.

16. The method of claim 1, wherein detecting the presence or absence of the one or more polymorphic variations comprises:
hybridizing an oligonucleotide to the nucleic acid sample, wherein the oligonucleotide is complementary to a nucleotide sequence in the nucleic acid and hybridizes to a region adjacent to the polymorphic variation;
extending the oligonucleotide in the presence of one or more nucleotides, yielding extension products; and
detecting the presence or absence of a polymorphic variation in the extension products.

17. The method of claim 1, wherein the subject is a human.

18. A method for identifying a polymorphic variation associated with breast cancer proximal to an incident polymorphic variation associated with breast cancer, which comprises:
identifying a polymorphic variation proximal to the incident polymorphic variation associated with breast cancer, wherein the polymorphic variation is detected in a nucleotide sequence selected from the group consisting of:
(a) a nucleotide sequence in SEQ ID NO: 1-4;
(b) a nucleotide sequence which encodes a polypeptide encoded by a nucleotide sequence in SEQ ID NO: 1-4;
(c) a nucleotide sequence which encodes a polypeptide that is 90% or more identical to the amino acid sequence encoded by a nucleotide sequence in SEQ ID NO: 1-4;
(d) a fragment of a nucleotide sequence of (a), (b), or (c) comprising the polymorphic variation;
determining the presence or absence of an association of the proximal polymorphic variant with breast cancer.

19. The method of claim 18, wherein the incident polymorphic variation is at a position in claim 3, 6, 9 or 12.

20. The method of claim 18, wherein the proximal polymorphic variation is within a region between about 5 kb 5′ of the incident polymorphic variation and about 5 kb 3′ of the incident polymorphic variation.

21. The method of claim 18, which further comprises determining whether the proximal polymorphic variation is in linkage disequilibrium with the incident polymorphic variation.

22. The method of claim 18, which further comprises identifying a second polymorphic variation proximal to the identified proximal polymorphic variation associated with breast cancer and determining if the second proximal polymorphic variation is associated with breast cancer.

23. The method of claim 22, wherein the second proximal polymorphic variant is within a region between about 5 kb 5′ of the incident polymorphic variation and about 5 kb 3′ of the proximal polymorphic variation associated with breast cancer.

24. An isolated nucleic acid comprising a nucleotide sequence selected from the group consisting of:
(a) a nucleotide sequence in SEQ ID NO: 1-4;
(b) a nucleotide sequence which encodes a polypeptide encoded by a nucleotide sequence in SEQ ID NO: 1-4;
(c) a nucleotide sequence which encodes a polypeptide that is 90% or more identical to the amino acid sequence encoded by a nucleotide sequence in SEQ ID NO: 1-4;
(d) a fragment of a nucleotide sequence of (a), (b), or (c); and
(e) a nucleotide sequence complementary to the nucleotide sequences of (a), (b), (c), or (d);
wherein the nucleotide sequence comprises one or more polymorphic variants associated with breast cancer selected from the group consisting of a thymine at position 7938 in SEQ ID NO: 1, a cytosine at position 26923 in SEQ ID NO: 1, a thymine at position 39977 in SEQ ID NO: 1, a thymine at position 59808 in SEQ ID NO: 1, a thymine at position 10511 in SEQ ID NO: 2, a cytosine at position 11556 in SEQ ID NO: 2, a thymine at position 17177 in SEQ ID NO: 2, a thymine at position 18384 in SEQ ID NO: 2, an adenine at position 28661 in SEQ ID NO: 2, an adenine at position 31656 in SEQ ID NO: 2, an adenine at position 31685 in SEQ ID NO: 2, a guanine at position 31749 in SEQ ID NO: 2, a thymine at position 45389 in SEQ ID NO: 2, a guanine at position 45459 in SEQ ID NO: 2, an adenine at position 46647 in SEQ ID NO: 2, a thymine at position 49860 in SEQ ID NO: 2, a thymine at position 53061 in SEQ ID NO: 2, an adenine at position 57308 in SEQ ID NO: 2, a guanine at position 61563 in SEQ ID NO: 2, a guanine at position 61660 in SEQ ID NO: 2, a guanine at position 67090 in SEQ ID NO: 2, a cytosine at position 67198 in SEQ ID NO: 2, an adenine at position 70071 in SEQ ID NO: 2, a cytosine at position 74006 in SEQ ID NO: 2, an adenine at position 75600 in SEQ ID NO: 2, a guanine at position 85761 in SEQ ID NO: 2, a thymine at poisition 90798 in SEQ ID NO: 2, a cytosine at position 90883 in SEQ ID NO: 2, an adenine at position 91259 in SEQ ID NO: 2, a cytosine at position 95416 in SEQ ID NO: 2, a thymine at position 95446 in SEQ ID NO: 2, a thymine at position 96368 in SEQ ID NO: 2, a thymine at position 97362 in SEQ ID NO: 2, an adenine at position 97630 in SEQ ID NO: 2, a cytosine at position 97989 in SEQ ID NO: 2, a thymine at position 98107 in SEQ ID NO: 2, an adenine at position 160 in SEQ ID NO: 3, a guanine at position 6053 in SEQ ID NO: 3, a guanine at position 18658 in SEQ ID NO: 3, a guanine at position 18694 in SEQ ID NO: 3, a thymine at position 18858 in SEQ ID NO: 3, a guanine at position 24683 in SEQ ID NO: 3, a guanine at position 27402 in SEQ ID NO: 3, a thymine at position 28494 in SEQ ID NO: 3, an adenine at position 32003 in SEQ ID NO: 3, a cytosine at position 35588 in SEQ ID NO: 3, an adenine at position 35856 in SEQ ID NO: 3, a guanine at position 40095 in SEQ ID NO: 3, an adenine at position 46683 in SEQ ID NO: 3, an adenine at position 52079 in SEQ ID NO: 3, a cytosine at position 53857 in SEQ ID NO: 3, an adenine at position 72720 in SEQ ID NO: 3 a cytosine at position 72752 in SEQ ID NO: 3, an adenine at position 196 in SEQ ID NO: 4, a guanine at position 13311 in SEQ ID NO: 4, a thymine at position 14486 in SEQ ID NO: 4, a thymine at position 19910 in SEQ ID NO: 4, an adenine at position 20575 in SEQ ID NO: 4, a guanine at position 23716 in SEQ ID NO: 4, a guanine at position 23890 in SEQ ID NO: 4, an adenine at position 24995 in SEQ ID NO: 4, a cytosine at position 29099 in SEQ ID NO: 4, a thymine at position 33994 in SEQ ID NO: 4, a thymine at position 34942 in SEQ ID NO: 4, a thymine at position 37139 in SEQ ID NO: 4, a thymine at position 40233 in SEQ ID NO: 4, an adenine at position 40472 in SEQ ID NO: 4, a guanine at position 42831 in SEQ ID NO: 4, a guanine at position 42976 in SEQ ID NO: 4, a thymine at position 44195 in SEQ ID NO: 4, a thymine at position 48843 in SEQ ID NO: 4, an adenine at position 58556 in SEQ ID NO: 4, a guanine at position 59286 in SEQ ID NO: 4, an adenine at position 60217 in SEQ ID NO: 4, a cytosine at position 62826 in SEQ ID NO: 4, a thymine at position 62857 in SEQ ID NO: 4, a thymine at position 63400 in SEQ ID NO: 4, an adenine at position 63960 in SEQ ID NO: 4 and a cytosine at position 74909 in SEQ ID NO: 4.

25. An oligonucleotide comprising a nucleotide sequence complementary to a portion of the nucleotide sequence of (a), (b), (c), or (d) in claim 24, wherein the 3′ end of the oligonucleotide is adjacent to a polymorphic variation associated with breast cancer.

26. A microarray comprising an isolated nucleic acid of claim 24 linked to a solid support.

27. An isolated polypeptide encoded by the isolated nucleic acid sequence of claim 24.

28. A method for identifying a candidate molecule that modulates cell proliferation, which comprises:
(a) introducing a test molecule to a system which comprises a nucleic acid comprising a nucleotide sequence selected from the group consisting of:
(i) a nucleotide sequence in SEQ ID NO: 1-4;
(ii) a nucleotide sequence which encodes a polypeptide encoded by a nucleotide sequence in SEQ ID NO: 1-4;
(iii) a nucleotide sequence which encodes a polypeptide that is 90% or more identical to the amino acid sequence encoded by a nucleotide sequence in SEQ ID NO: 1-4;
(iv) a fragment of a nucleotide sequence of (i), (ii), or (iii); or
introducing a test molecule to a system which comprises a protein encoded by a nucleotide sequence of (i), (ii), (iii), or (iv); and
(b) determining the presence or absence of an interaction between the test molecule and the nucleic acid or protein,
whereby the presence of an interaction between the test molecule and the nucleic acid or protein identifies the test molecule as a candidate molecule that modulates cell proliferation.

29. The method of claim 28, wherein the system is an animal.

30. The method of claim 28, wherein the system is a cell.

31. The method of claim 28, wherein the nucleotide sequence comprises one or more polymorphic variations associated with breast cancer.

32. The method of claim 28, wherein the one or more polymorphic variations associated with breast cancer are at one or more positions in claim 3, 6, 9 or 12.

33. A method for treating breast cancer in a subject, which comprises administering a candidate molecule identified by the method of claim 28 to a subject in need thereof, whereby the candidate molecule treats breast cancer in the subject.

34. A method for identifying a candidate therapeutic for treating breast cancer, which comprises:
(a) introducing a test molecule to a system which comprises a nucleic acid comprising a nucleotide sequence selected from the group consisting of:
(i) a nucleotide sequence in SEQ ID NO: 1-4;
(ii) a nucleotide sequence which encodes a polypeptide encoded by a nucleotide sequence in SEQ ID NO: 1-4;
(iii) a nucleotide sequence which encodes a polypeptide that is 90% or more identical to the amino acid sequence encoded by a nucleotide sequence in SEQ ID NO: 1-4;
(iv) a fragment of a nucleotide sequence of (i), (ii), or (iii); or
introducing a test molecule to a system which comprises a protein encoded by a nucleotide sequence of (i), (ii), (iii), or (iv); and
(b) determining the presence or absence of an interaction between the test molecule and the nucleic acid or protein,
whereby the presence of an interaction between the test molecule and the nucleic acid or protein identifies the test molecule as a candidate therapeutic for treating breast cancer.

35. The method of claim 34, wherein the test molecule inhibits cell proliferation or cell metastasis.

36. A method for treating breast cancer in a subject, which comprises contacting one or more cells of a subject in need thereof with a nucleic acid, wherein the nucleic acid comprises a nucleotide sequence selected from the group consisting of:
(a) a nucleotide sequence in SEQ ID NO: 1-4;
(b) a nucleotide sequence which encodes a polypeptide encoded by a nucleotide sequence in SEQ ID NO: 1-4;
(c) a nucleotide sequence which encodes a polypeptide that is 90% or more identical to the amino acid sequence encoded by a nucleotide sequence in SEQ ID NO: 1-4;
(d) a fragment of a nucleotide sequence of (a), (b), or (c); and
(e) a nucleotide sequence complementary to the nucleotide sequences of (a), (b), (c), or (d);
whereby contacting the one or more cells of the subject with the nucleic acid treats breast cancer in the subject.

37. The method of claim 36, wherein the nucleic acid is RNA or PNA.

38. The method of claim 37, wherein the nucleic acid is duplex RNA.

39. A method for treating breast cancer in a subject, which comprises:
detecting the presence or absence of one or more polymorphic variations associated with breast cancer in a nucleic acid sample from a subject, wherein the one or more polymorphic variation are detected in a nucleotide sequence selected from the group consisting of:
(a) a nucleotide sequence in SEQ ID NO: 1-4;
(b) a nucleotide sequence which encodes a polypeptide encoded by a nucleotide sequence in SEQ ID NO: 1-4;
(c) a nucleotide sequence which encodes a polypeptide that is 90% or more identical to the amino acid sequence encoded by a nucleotide sequence in SEQ ID NO: 1-4;
(d) a fragment of a nucleotide sequence of (a), (b), or (c) comprising the polymorphic variation; and
administering a breast cancer treatment to a subject in need thereof based upon the presence or absence of the one or more polymorphic variations in the nucleic acid sample.

40. The method of claim 39, wherein the one or more polymorphic variations are detected at one or more positions in claim 3, 6, 9 or 12.

41. The method of claim 39, wherein the breast cancer treatment comprises a nucleic acid comprising a nucleotide sequence complementary to a nucleotide sequence in SEQ ID NO: 1-4.

42. The method of claim 41, wherein the nucleic acid is a double stranded RNA.

43. The method of claim 39, which further comprises extracting and analyzing a tissue biopsy sample from the subject.

44. The method of claim 43, wherein the treatment is chemotherapy, surgery, radiation therapy, and combinations of the foregoing.

45. The method of claim 44, wherein the chemotherapy is selected from the group consisting of cyclophosphamide (Cytoxan), methotrexate (Amethopterin, Mexate, Folex), fluorouracil (Fluorouracil, 5-Fu, Adrucil), cyclophosphamide, doxorubicin (Adriamycin), and combinations of the foregoing.

46. The method of claim 45, wherein the combinations are selected from the group consisting of cyclophosphamide (Cytoxan), methotrexate (Amethopterin, Mexate, Folex), and fluorouracil (Fluorouracil, 5-Fu, Adrucil); cyclophosphamide, doxorubicin (Adriamycin), and fluorouracil; and doxorubicin and cyclophosphamide.

47. The method of claim 39, wherein the breast cancer treatment reduces breast cancer metastasis.

48. A method for detecting or preventing breast cancer in a subject, which comprises:
detecting the presence or absence of one or more polymorphic variations associated with breast cancer in a nucleic acid sample from a subject, wherein the polymorphic variation is detected in a nucleotide sequence selected from the group consisting of:
(a) a nucleotide sequence in SEQ ID NO: 1-4;
(b) a nucleotide sequence which encodes a polypeptide encoded by a nucleotide sequence in SEQ ID NO: 1-4;
(c) a nucleotide sequence which encodes a polypeptide that is 90% or more identical to the amino acid sequence encoded by a nucleotide sequence in SEQ ID NO: 1-4;
(d) a fragment of a nucleotide sequence of (a), (b), or (c) comprising the polymorphic variation; and
administering a breast cancer prevention procedure or detection procedure to a subject in need thereof based upon the presence or absence of the one or more polymorphic variations in the nucleic acid sample.

49. The method of claim 48, wherein the one or more polymorphic variations are detected at one or more positions in wherein the one or more polymorphic variations are detected at one or more positions in claim 3, 6, 9 or 12.

50. The method of claim 48, wherein the breast cancer detection procedure is selected from the group consisting of a mammography, an early mammography program, a frequent mammography program, a biopsy procedure, a breast biopsy and biopsy from another tissue, a breast ultrasound and optionally ultrasound analysis of another tissue, breast magnetic resonance imaging (MRI) and optionally MRI analysis of another tissue, electrical impedance (T-scan) analysis of breast and optionally of another tissue, ductal lavage, nuclear medicine analysis (e.g., scintimammography), BRCA1 and/or BRCA2 sequence analysis results, thermal imaging of the breast and optionally of another tissue, and a combination of the foregoing.

51. The method of claim 48, wherein the breast cancer prevention procedure is selected from the group consisting of one or more selective hormone receptor modulators, one or more compositions that prevent production of hormones, one or more hormonal treatments, one or more biologic response modifiers, surgery, and drugs that delay or halt metastasis.

52. The method of claim 51, wherein the selective hormone receptor modulator is selected from the group consisting of tamoxifen, reloxifene, and toremifene; the composition that prevents production of hormones is an aramotase inhibitor selected from the group consisting of exemestane, letrozole, anastrozol, groserelin, and megestrol; the hormonal treatment is selected from the group consisting of goserelin acetate and fulvestrant; the biologic response modifier is an antibody that specifically binds herceptin/HER2; the surgery is selected from the group consisting of lumpectomy and mastectomy; and the drug that delays or halts metastasis is pamidronate disodium.

53. A method of targeting information for preventing or treating breast cancer to a subject in need thereof, which comprises:
detecting the presence or absence of one or more polymorphic variations associated with breast cancer in a nucleic acid sample from a subject, wherein the polymorphic variation is detected in a nucleotide sequence selected from the group consisting of:
(a) a nucleotide sequence in SEQ ID NO: 1-4;
(b) a nucleotide sequence which encodes a polypeptide encoded by a nucleotide sequence in SEQ ID NO: 1-4;
(c) a nucleotide sequence which encodes a polypeptide that is 90% or more identical to the amino acid sequence encoded by a nucleotide sequence in SEQ ID NO: 1-4;
(d) a fragment of a nucleotide sequence of (a), (b), or (c) comprising the polymorphic variation; and
directing information for preventing or treating breast cancer to a subject in need thereof based upon the presence or absence of the one or more polymorphic variations in the nucleic acid sample.

54. The method of claim 53, wherein the one or more polymorphic variations are detected at one or more positions in wherein the one or more polymorphic variations are detected at one or more positions in claim 3, 6, 9 or 12.

55. The method of claim 53, wherein the information comprises a description of a breast cancer detection procedure, a chemotherapeutic treatment, a surgical treatment, a radiation treatment, a preventative treatment of breast cancer, and combinations of the foregoing.

56. A method of selecting a subject that will respond to a treatment of breast cancer, which comprises:
detecting the presence or absence of one or more polymorphic variations associated with breast cancer in a nucleic acid sample from a subject, wherein the polymorphic variation is detected in a nucleotide sequence selected from the group consisting of:
(a) the nucleotide sequence of SEQ ID NO: 1-4;
(b) a nucleotide sequence which encodes a polypeptide consisting of an amino acid sequence encoded by a nucleotide sequence in SEQ ID NO: 1-4;
(c) a nucleotide sequence which encodes a polypeptide that is 90% or more identical to an amino acid sequence encoded by a nucleotide sequence in SEQ ID NO: 1-4; and
(d) a fragment of a nucleotide sequence of (a), (b), or (c) comprising the polymorphic variation; and
selecting a subject that will respond to the breast cancer treatment based upon the presence or absence of the one or more polymorphic variations in the nucleic acid sample.

57. The method of claim 56, wherein the one or more polymorphic variations are at one or more positions in wherein the one or more polymorphic variations are detected at one or more positions in claim 3, 6, 9 or 12.

58. A composition comprising a breast cancer cell and an antibody that specifically binds to a protein, polypeptide or peptide encoded by a nucleotide sequence identical to or 90% or more identical to a nucleotide sequence in SEQ ID NO: 1-8.

59. The composition of claim 58, wherein the antibody specifically binds to an epitope that comprises a glutamine at amino acid position 278 in SEQ ID NO: 9 or a glycine at amino acid position 389 in SEQ ID NO: 12.

60. A composition comprising a breast cancer cell and a RNA, DNA, PNA or ribozyme molecule comprising a nucleotide sequence identical to or 90% or more identical to a portion of a nucleotide sequence in SEQ ID NO: 1-8.

61. The composition of claim 60, wherein the RNA molecule is a short inhibitory RNA molecule.

The application's sequence listing, which the Patent Office published only in electronic form, follows.

SEQUENCE LISTING (634 sequences)

SEQ ID NO: 1 - DNA, 76600 bp, Homo sapiens
actaagttactacaaagcagttaacatagtctcagatattaaaaatttaagatactgaagagctaagtcaattcctgataatttcttaaatttgtgatctatttctttcactgtattcagatcttcatatttrtagtctttgcttagagtcttcccacccgcccccacctcgctctgttgctcaggccggagtgcagtggtgcaattccggctcatcgcagcttctgcctcctgggttcaagtgattcttgtgcctcagcctcctcagtagctgaaattacaggtatgtaccaccatgcctgtttaatttttatgttagtagagacagagtttcatcaagttggccaggctggtcttgaactcctgctttcaagggatttgcctgctttggcctcccaaagtgctgggattacaggcgtgagccattgcgcctggccaagtctttgccttactcttaacaattcctcacagctacctttctatatgttcaaaacatacttcggcattttaaagttacttttcctttaaaccttctatttcatttacctacttaagattcctaccttttccttttgtttcaatcaattgatacttttagtcctatcagtctccacattttacctatcctgtgtatattttcgtaaatactcccaccaacatatttttgttttgtttttaaggtttttttggagacaggctcttgctctgtcatccaggctggagtgcagtggcacgatcatggctcatagtagctctgacctcctgggctcaagcaatcttcctaccttagcctctcaagtagctgagcctacaggcatgcatcactatgcccagctcatttttaaaattacttgcagcgacagggtgtcctatgttacccaggggatcttcaactcttaggctcaagtgatcctcttgtctcagcctcccgaagtgctaaccactacacctattttcttaaatttttattttgacggaagagtttcatcccttttttcagttaagtcatttacactcctctcctagaattacatcaaaactcagcaaagctataattttacataagagattttctccattcaacatctcaaaaattcctgtatcaaaccatatttcttgtcatgaaacgtattaggacgtatctgaactgctggctacaagttagtatgtatacgcttatacaaggagagatatttaaaagctgattttttcatttgatatcccctttcaaattttaacctttgttttcaccgccacactagaagtaaaaagtgaggaaggggtatgggggaaattggacttcctcaatctcttcttaacatgcaatccctataaagaaaaacattcatttataactgtaataaaatacattaaacacagatattaaacccaagagaaacaattctcagaggatggatactattaattggcctaaagaaaaagggaaactatttttaagaaggccagttagttgttttaagtacaatagctctctggcatactcggaggattagttccagaaccccacgtataccaaaacccgtgcatgttcaagtctaacaggaggccttgtggaatctgacaggcatatggcattttctatcccagtttggttgaacagcacgtgcgtaagtggacactcgcagttcaaacctgtgttgttcaagggtcaactgcagcacaggcgcgtagaaaaatacagcaagggaagtgggaaagcaggagactgaaaaaaattttaattacctatctactactgaaaatgataagaaatgacaaatgtctgcaaataaatgccactagtccactgcaatcttcccagattatctccacctcttctccctttggttggtataagaagtaataatgaaaataaagtcaggacactgggtgttagaaatctacctttgtaactcaagatttcaatcaaagctttgaagcgcagaaaagttaagtgactatggcctaacctctctagactctggtcacttgcaaaatagggattatgccaccaaacagtttttttcttgcgaaaataaaatatgtcacaaatataagacctaaccaatgggaaagagaaaataaatttaacttatatattgagtttctttccaatttatttcttttatggtattattacaatataattaatgctttctgaacaaaagattgagatataagctctgaaagttggcctaatactcttgaggaacaataagattaaatatttgaggtgagagattccaagagtttaatgagtagttgaaagagtaagaacagggtatggagacccacccagaaccccagagttgccacaaagattttaagctgaagatatctgagattcaacagatgcaggaaaaaagccttctcggagtttctctaatctgactaaaaggtgcagcttccgagaaatgaagttaccataaataccctctgaggagtctgatggccccgaagaatggaaagaccagtcataccagtttagacaaatgtcatcacaaactttatcccccatctcttctcctaaaaacttgtctttcctgaagaaatgtacgtttttctaataaaagctgtttctccctccttcctttccctactagattaggtgtacaagcttttaacttcatccacaagctagcttcagtatttcttctgttgcctcttgcatccatatacaagaaactttttttccatgttaatctgttttttttgtcagtttacttcacaggcccgttactgaacatacaagggtggaggaaaaggtttttcttcgcttaaaaggggctagaagaaatcttaaccgtttaacagttgtgtaactagcaaattacttggtctctttatggaagagcttattcaactacaacgtaaaacggggataacggtgcttacttacaggattatcttgggagttaaaagagtgaataaacataacatggttcgtatcatgcatggcgtacagttttactattatatactatcacaggagattctttttttttttttgagacagagtctcgctctgtcgcccaggctggagtgcagtggcgtgatctcggctcactgcaagctcggcctcccgggttcacgccattctcctgcctcagcctcgcgagcagctgggactacaggtgcccgccaccacgcctggctaattttggttttgtatttttagtagagacggggtttcaccgtgttagccagaatggtctctatctcctgacctcgtgatctgcccgcctaggcctcccaaaatgctgggattacaggcgtgagccaccgcgcctggccaagagattcttaaactataggaagtatgtgataaaactttataactttgggatatggagtccaaaacgagtatagtattatatttccagttcccatgttcgattatttttatttttattttgagacggggtctcactctgtcgcccaggctcaagtgcagtggtgagatcatagcaatcctgccttggctgggactacgggtgcgcactaccacgcatggctaattaaaaaactttaaaaaaagttttagcagagacaagatcttgctatgttgcccaggctggtctcgaactcctgggctcaagtaatcctcccacctaggccttccaaagtgctgggattagaggcctgagccaccacgtccagctaatttctgataatgattctccaaaaagattaacagtaaaggccccccaaagtgaattattccttgcctttggaattaataaaactgaaaggagttagaagataatgttccttcatatgtcttgtagagattattttttctcataatcagaatccaagtcaagaaagttcaaagtacacaagctgaaaaacccataaaagtacttttttggaagactaataaggcaaaccatagatcctgaaagataaaaaacttaattctaccaaaagcttacctttgtctctatctgtctgtcttgtatgtatatatataagattatcaacaaggcagagaatcccaagcctttaggaaagatactaactgcaagatgctgattatcagagtgtcggatgactccttttgtacttcttaaaatccgatttgtgttaatgtttttgtgttgtgtgtgcgtgtagctaacctgttactaagctttgatgcttttccccacctcttattatctttgtatgaatgtgaggctacttttaaattacttattactggggctgggggctgtggctcacgcctgtaatcccagcactttgggaggccgaggcaggcagatcacctgaggtcaggagaccagtctggccaacatggtgaaaccccgtcgctattaaaaatacaaaaataagccgggcgtggtggcaggtgcctgtaatcccacctacttgggaggcttgaacctgggaggcggaggttacagtgagccgagattgtgccactgcactccagcctgggcaagagagtgaaactccatcttaaaacaaacaaaaaaaattacttattactttgctagattttgctagagtagctattccagaaagtcgaggggtgcaggaaagatagaggcacaggacatttttacaggttttaaaacccaaatactgtcacattatctgatcctacagaggcaggctgctttatccaaatacgggtcctctgcttttctaaaccaaaccacattatgagtgaaattttataccatatcctaaatttgtgccatcacaaacattctcaacattccatattttaactcttcccctctttccgtgtggcttctgcaagacctcagctgcttaaggagtctttacctctacttggttgtccaggtatcatacctgccttcttagttttagttaatattaagtgaagttgtgtgggtaggagcatgcgtgtatgttttgtttttcttactgcttttgtgtgttctgtgtgttttgaggttagggagcagatattaagttacccgtaaccatacctaaaaagtttatattccttataaacatataaatgagaggctgtctataatactaaggaaccagtgactgtaactcggcttccatatagtgtacctacggggtggaatatgttggccagaagataaaagtacaacatagggtcccattggcagatttgtttctcacaaaaattaacgaattgacattctgacttcatacgttagtctctattgtttggttaatgtgaattaatattcagaatttactcccaattaaacaaattttcccctgtttagttactaagcctaaaaggccaaggttttactagattgatagaacctcccatacttaagaaagaccaagcaatgctcaacatgctgctttgatcagctaaaaaacatactagattaaaaaagaaattctgcttcaaaaaagaataaatgtaattagttgataaattacagaattactcatttagctcctttactcacatcatcttttccttattcatcatgttgtttatgagcatcaacaaatatgctatgtattcttttgggtatttaagctttctaaattccactgaggttttattggagatgtggttatgctgatgtacactagagtcttacatatgtttactatggcatgacctcaaattctccatcaccaccttcttcccccaggaacttagtaaagtcacatccaccatacttcaccatctagacacacagtatactccaaacttggcattcttctctttattttaaatagcggcagtaacagctattagaaacatgtcttaaatcttgatattaataattataacctaattcaaaagctagaaaaaatctgggtgacctaatttttttgggcattattactatatctgcttatggtttttattattttttcagatcaataaagtagtaaaagggacattaaaagctatgtcttcagttacagaacagatttaaaaaagtaaacagttaaattaacccacataatgggggttttgtgggttaagcttgtggatgccagttcccacatcattaaaaaatacttttggcagggtgcagtggctcacaccggtaatcacagcactttgggaggctgaggtgggcggatcgcctgaggtcaggagtttgagaccagcctgaccaacatggagaaactctatctctactaaaaatacaaaaaattagccggtatggtggtgcatgcctgtaatcccagttacttgggaggctgaggcaggagaatcacttgaacctgggaggcagaggttgcggtgagctgagttcgcaccactgcactccagcctgggcagtaagagtggaaccccgtctcaacaaacaaaaaacaaaaaccaaaaaaaaccaaaaaaacaaacaacttttgatctggaaaaagaactaggttcagactaaacaaatactggattagcaaatcagaaaaaaagcacaaaaaaggaagtttagcttggaagttaaacattattaaatattaaagaggaagaattttaaaaactaaaataagcaataactatagacaataagaatgttattaccttcaggtcgatattgtgcaacaattgtgacagcctggccagcatttttcaatgcagctgctgcctgctcatgactagcagctctgaggtcaacactgtttacctgtaaatcaaaccaaatcttaatttgggagaaaagaatcactgtgattagaaatcacaatagtctattctttgagtaagcatgtattaaaaaattagttgcaataactttaccactaaaatgtttcttgttctgattgactaaaaatatattgtgtagtaaaacaaaatattatcattcaaagctattttatttactaaaaccaccttgcttaatgtcaagttagtaaaaccaaaacattttcccctagaaggctgggtatcaatccattgagaaatgtaccttaatttgagaacctgaaaaatcaagtggcatcattttgcacactttattttgctaggaactcaagcaatgggagggaaagtcattttgcttgtagcatccatttacctcctgccacattctcacgcctactgctcaattcagttccaattatttttcttcctgtacaaactaaaacttccattcttttggtataataggaaagctattatttagaaatattaaaacagctcagatttcaaggactgatttaattagaataaatgttaattaaatgaaccaggagttattttttgaattaagagcccttccttaggtgaaataattatccaattctaccagtaggtacaatcctactccagaagaagaggcaacttaattcttatttctcaaaggttaccaatactttgcgcgcatatatacatatatagtgcaaggtacattatcttaagagattgttccttttccacaataagacaaacttaagaggacattcatggaagcattatacttgaatgtaataaactttaaataccgaattaaaaaaaattaagaagcaacaatgaatagaatatggcaatgttcaggaccttcactgaaaatttttggaaaggaacgatcatcatgcaatttttacacaaaaacttgttttgttgagaactaatctaaaatctgttaaagatcacatatcacttttaaaaaatttgactatgagcccagaaattcttgggatcataaatttacataaagaacattttaaccatataaagatctgatgttttatattatctaaaaagaaaccattatgcaactaaatttaaatacataccccttgaggctgggcatggtggctcacacctgttatcccagcactttgggaagctgaggtgggtggttcacttgaggccaggagtctcagaccagcctggccaacatggcaaacacctgtctctactaaaaatacaaaaattagccgggcatggtggtgtgtgcctgtagtcccagctactcaggaggctgaggcatgagaatcacttgaacctgrgaggcggaagttacagtgagctgagatcacatcactgtactccagcctgggtgacagagagagggacgctctgtctccagccagccccccccacccccctcaatgaaaaccaagatctaaaatccataacataaacaaatgtaaacaatgtggttattagtatctccagctgatgatggccatataaaactcaatacaatgtataaacagttctacttagtgcataaagaaaatcctcccaattcctgggagaacatatcaggcaagaaatataaagaaagacaggtttttcacagattattgtagaaaagattaagaatgttaatgaattatttctgtgcaccaaactcttttaagagcataatttgttgaacaaaactacatattaaagactttccagactatcactgaacatttcaattgaagatacattattaaggatattttagaagaaattccagtactgagagagatacttgtataaatagccttagagtcactttttttcttttacaccgacatttttaaaaatggagaaataattcgcataccatagaattcacatttttaaagcatatagtttagtggtttttggtatatttgcaagtctgtgcaaccatcattaccacctaattccaaaatattttcattaccccaaaaagaaactctgtatccactgacagtcactcctgtgtctcctctccatccctggcaactacgaagctactttctgaccatactgtacatatacctatatatacctattcggtatatttcaaataaacgggatatataatatgtagccatctgtgcttggcttctttcacttattttccaggttcacccttggagcatgtatcagtacttcattccttatatttagtggcgctaaataatgcgccactaaaatccattaaaaatggatatactggccrggtgtggtggctcacgcctgtaatcccagcactttgggaggccaaggcaggcagatcacgaggtcaggagatcgagaccttcctgggtaacatggtgaaaccctgtctctactaaaaatacaaaaaaattagccgggcgtggtggcaggcacctgtagtcccagctacttgggaggctgaggcaggagaatggcgtgaagctgggaggcggagcttgcagtgaacagagattgcgccactgcactccagcctgggcgacagagcaagactctgtctcaagaacaaaaaacaaaaaaaccaaacccaaaaaaaaaaggatataccacttttgttgatccatgtccttaaatttatacttaagtattttattctttttgatagtattataaatcaatgttttctttgtctatcctgcaaatttaactgaactcatttattagcttgacagtctgttgttgtatttcttaagattttttctatacaagattatgtcatctgcaaacagaaatagttttcttgctttttattctggtagcctttttttttttttaatcttgcctaatttctagaacctccaggacaatgttgaatagaagtaggaagagcagatacccttgtcttgttcctgattttagagggaaagctttcagtctctcaccatttagtatgatgtcagctatagggtttccagagataccctttaacaggttgaagttcccttttattcctagtctatttagtgttcttatcatgaaaagctgttggtttatgacaattgctttttctgtgtctactgagatatcatgtgctttatgtcctttattaagatggtgtcttactttgattggtttttctatgttgaactaaccatgcattccttgaataaattccatttggttatggtacatcatccttgttcatgctgttggatccaggttgttattttgttgatttttacatctatattcatatgggatattggtttgtaattttttcttcttgtgatgtctttggtttggtataaggataatactggccacacagaatgagctggaaagcattcctcatgcttattcctttttggggaagagtttgtgaatgattggtgttaattctttaaatgtttggcagaatgtaccagtgcagccatctggtcctgggatttttgtgttttgttagtttttgattactaattcaatttccttgttttaaatctattaaaattctctatttcttcttgagttagtttcagtagtttatgtctttctagaaatgtattggtaattagagtatataactataaaatatataccatctatgactacataatgatatactataaatgtctttcgcctttagtaataatgtttttcttcaagcgtcctttgatattagtcatattagtacagccacagtaggtgtcttttggttactttttgtgtaatgcatcttttccacccgtttactttcaacctttttgtgtctttgagtctaaagtgtctctcttgtagaccctgtgtagttggattctgttttctaatctactttatcaacatctttggccttttaactggagtgcttaatctgtttatatttaatataattactgataatgtagaatttacttaatttggttatttgttctatgtcttttctttctctattcctcaattactgcattatttttatattaaatagatatttcctagtgtaccattttaattcccatgtcattaattttactacatatatttgttagtcattttcttagtggttatcttggattataagtaaaaatttaaagccagatgtggtggttctagactgtaatcccagtgactcaggtggctcaggcaaaaggactgaagcaggagcatcacttgagtacaacactttgagggctggctaggcatcacagtgagacccttatctctaaaaaaataaagaaaacaattcagccaggtgtagtggtgcatacctgcagcccagctactcgggaggctgaggcacgaggattgcctgagtaagtttgaggctgcagtgagctatgactgtgctactgcactccagcctgggggacagagtgagatgctgcctctaaaaataaataagtaaacaaacaaacattttataagaacctagtttctttacccgccttgtggtgttgtcatattaattttatgtttatacgatgtgtgcacatcaaatttgtaattattgctttattcagttgtttttaaaatcaggttggagaaaaaaagagttgcatataaaacaatacccttatgttgttttatatttacctgtgtagttgcctttacttaggctctttatttcttcatgtggatttgagttactctctagtttcctttcattttagtctgaaggattctcttatttcctatagggcaggtttttgagagatgaactccttcagcttttgtttatctggcaatgtcctgatttcttctttattttcaaaagatagttttgctggatatagagttctagtcaacaaagtttttttcttttcagaattttgaatttgttatttcactgctttctgacctccatggtttctgatgagaaatcagctattaaccttgttgaggatcccttgcacgtggtgagtcatttctttttgctactttcaatattctgccttcggctttagacagttcgattgtaatgtgtctatgttgtagatctctttaaattaatttaacttggagttcactgaggttcttggattaatggttttaatcaagttctagaagtttttgggcgagtatttattcaaatattctttcttcttttttctctctttcccatctttcacatactcccattatgttggtaaatttgatagtatcccataggtctctgaagctgttaatttttcttcattctttctttctttgttattgttcagttcttcagcatcaaaatctcaattgacccatcttcaagtttgctgattctttcttctgccagctcaaatctgctgttgaccttgtctagagaatttttcatttaagttactgtactttccaactccagaatttctatttggttcttacatataatttctaactctttattgatattttttacatggtgagatattgttcctttactttcatgtcagtctacaggatggttttcttttattccttgaacgtatttaaaatacctggtttaatgtctttgtttagcatgttcaatgtctgaccttccctaggaacgatatccattgattgcgtttttctcctgtatatgggccatacttttctttccgcttgtctcaaaattttatgacgaaaaataggcatttaaaataaatataatacggcaactccagatagcagaactgtcctcttatctacgcttgtcattgctgtctgttagtgacttttcttaatgttataaagtccgtattctttgttgtgtgtggccactgaggtctctgtctggttagcttagtggttaatgactgaatacatatttccttaaatacctgaaacttacaaatcttccactcttttccaagggctatatgtgcattttggggcccacctttaacactcagataagcaattaacaactgccttaaatcgcttgcacagaggctcatgatcaggtagaggtgagagtttaaggccttttctagtctttcctgagcatgcgcacagccctgaacatgtgtgtggccttctggttccaaggatacacggaggttttcaaaggccttatggagaattcactcctccaattttccttttaagtttattgatcggtctactatttcctagtgcttttagggcatttccctagagaagttcagtaagcattaaaattttaaggttactgatgcatattgctaaacataatgctgtatttaactgcactcacattagggtgagctacttccctggactagctgagacttccagttttagaatcaagaccaaagggtttccagacatggggcattcagttctaaaaccatgaatgttctgggtgaactaggttgagttggttggtctcacacactttagcactgtatcaatgacctatctaaagtggttccaaagggacaatttaaaaacatctattactgaactctaggctaaacgaaaatttatttggacacaaagtgtgaagtgaggctctaagctaattttatttccctaaataactaggtaatatgttcaacaatattaatcttttaagtccattccctaccactaagttttccttatcatactgtaacttaaataaattacagtatattttacaatgaaatgtagaaatttgaacagctcagctgaaaggattttgctaaccrtaaaaatcatgaaaccactaccccagacaagacatgtatcttttccaccgatgttcaactgtgcacttctatagtcagtcccaatcactggcaaccactttctgacttacagcaccacaagttagtgtcacctgctcttgattatcatgtaactggaattatatagattgtatttttgttatctgttttgctcaacatacttgttttgtgtttcagtagttgttccttttaattgctgagtagtattatattgtgtaaacataccacaatttagcaattgtcctgctgatggaaacctgggtcatttcaaggtctagattattatgaataaggttgttaagaatgttcttgtcaaagtgtttttgttgatgtatgctttcatttgtcctgggtaaaacctgggtgataagattagatgtatgtttaacttcttaaaaaccttcccaaaagttcttgtagtggtataccatttacacgtccactagtagtgaatgagggttgtagctgctccacatcctcatcaatgaatgttgttatttttttcttttgttgttcaactaagtgggatatagtatttcattacgacttcaagaatacctatttttatctaggcataatcaatcttctttagtgtatagttaagttttggcaaatgtgaatttcgtgcagccacccacaatcaaaatatagaacaattacatcactcttattcaactccctacaaacctcttcattcactgcggtttgtgcacttctctgatgcctaatgttaagcaccttttcatgtgcttactggccattcacatatcttttgtgctgtacctgctcaagtctttggtgcatttttaattgggttattcatctttttattgttgatttgtaggagatatttatatattgtggatacaagtagtatgtcatgtatgtgctgagaatattttttaccactgtgtggcttgcctatttggtttttttctttctttttttttgagacagggtgttgctctgttgcccaggctggagtgcagtggtgggatcaaagctcactcactgtagcttcaaacacctaagctcaagtgatcctcctgccttagcctcccaagttgctgggactacaagtgcccactactatgtctggctaattaaaaaaaaattttttttttaaagatggggtcttgctatattgatcaggctggtctcaaacgcctggcctcaggcgatccacctgcctcagcctcctgagttactgggattataagcaagagtcacgtcacccagcgtatttggtttcttaatgtcatcttctttatggttagtgttttatgcattttgtccaaggaactgttacctactctaggcctgtgaacatagtctctgatattttcttctaggaagattatggttctgagttttatatttagatctataatccatctagaattaaattttatgtctggagtaagactggtttaggtttataattttatatacagatatctaggtattatagcaccatttgttaaaaagattttcccttctctattgaactgacttggtggccctctggtactatttaagaaatttgtctaatccatatttactaagattttcttgtatgttttcttttagaagtttagttctatggtccatttcaagttaatttttctatacaacatgaagtaagaaatgagattcttcttcttttccttgtgtctacttgttctatcaattaaagaagagggcatttaaatctccaaatgtgactgtagatttgtccatttccttccttagttctgataatttatacttcatgtattttgaaagtattactaggtatgtcttcttgatgaaatgacacttttatctttctcgctgcttttataattatgaaatctatgtataataacattatttgtcttaaattctattttgtctcatattaagacagtagctttagtatgctatttgcatagtgtaccttttttcacttttacttacaacccatgaacctttatatttaaagtaaatttctgataaacagtatatagtttggtcttgcttttttgaaccaagccgacaatttctgtatcttaaaatcgtagcttttaagattagataaagaaaatttaagctgctatagtttcagattagatatagataagatatagttaagatacagttataggtaaggtatagataagatgtagtttcagattagatatagataagaaaattgaagctgctacagtttcagcttcttgggaggctcaggcaggaatatcgtttgagcccgtaagtttgaggctataatagtgctctatgattgtgcctgtgaatagccactgtactccagcctaggcaatgcactgaagccctgtctcttaaaaaataaaagaaagaaaaaagaaaagaaaatttataaacttgaattacaaggagacagagctgtaaatatgaaattggggttaacagacatgaaaaacagattcacatccactcataggagtttagggacagagtacatacaacatgggaaaggcaaaatttgaaaagacaatggctaagtcttcagaattgatgagagaagtttttagaattgatgaaagacatgactcctctgactcagtaggcataatgaatcccaaacacaataaataatatgctagacatcgacaaagtttcacattttagtgaaactgcagcacatcaaacacaaagcatcttacaagcagccagcaaacccccacaagtcacctacgaacaagacagagtagacttctttcgttaaatagaaacaacacgccagacaacataaaacagtatcttcaaaatactgagaggtaacagctatcaacctgtgtaattctagattgaactaacttttaaagtgaaataaaataaagatactttcagataaagtctagaatatttacgattaaggaaccattgctgaaagcacaaatcaagggcttgcacactaaggtgcatttagatatctgaagggcatttttgctttttacaatgactagggagttttactagcatgtagcatgtatatgaaagcttttaaaaaagggaaattttcggccaggtgcagtggctcacgcctgtagtcccggcactttgggaggccgaggtgggaggatcacgaggtcaggagatcgagaccatcctggttaacaaggtgaaaccccgtctctaaaaatacaaaaaaattagccaggcgtggtggcgggtgcctgtagtcccagctactagggaagctgaggcaggagaatggcatgaacccgggaggcggagcttgcagtgagccaagatcgcgccactgcactccatccagcctgggcaacagagcgagactccatctcaaggaaaaaaaaaaaaaaaaaaaaaaagggaaattttctatgaagagcaagacagtcctatacaacaaataactgtacaatccaaatgctgttagtggtccactgagaaacacagaagagggaagatacaagatgggacggtaaacaaaaattgtatgacctgtggattaacttttaataaacaaaaataaaaattacaatttatgggtataaacatgaaacagaagtaaaatactagaaatggcatgattagaattaaagtttcccaaagtctgtgtgtcacagtagaactataggtaagttttagacaaaaattgtgtatgggtaacaacataagcacacaaattgaaagtaagaagaggagaaaagatgacacaaatatcaagccaaaaaaaaaaaatcagccacattaatagcagacaatatagattctagggtaaaaccactattataaatcaagatgttcattacataataacaactataaaactatgtgtacccaataatacaatttcaaaagacatactaaaaaaacctaatgctatgaggaccaactgttgaacccatgtttgggtagctttaaaaaaatcatatttggatagctttcaaaacctcaatagatcaagaaggtaacagattaaagtataaagaagtacacaagtaacaaacttgagttaatagacacatagcaaactttcyagtcaataaatagagaacacataatttcttcaagcacatttataaaaactgacccctttctataaaagaacacctattatataatatgttctctgacactacaattctacaattaagctgtaaaatgttaagaagataaccaagatatccccattactttaggatataaaaaaacagaagaccttgctttaaaaataggtccagtgaaaataacaaaaacgtgatcttgactaacgtgtcttaccgatataatacgatctccttttctgagctctccacttagatcagcaggtcctccggctaagataaaggaaataaatattccttctccatcttctcctcctacaatgttgaaaccaaggcccgttgagccacgatgaagaacaacttttctaggttccctaaaaattaaaaaaaattgagtatcttggaaattttatataaaacctgacattctatcagtgagaactacctactgataatttttatgttatcaaactacaaagaaagctagacaaaatataaatggtttttctaaaactacgagataaagagattctaagcctacaaatcaaaggaaaaaatctaattttatataaaagcaaaaaacctgtgttatataaaacagaaatgaaaccaaaacagaaaaaaaacgtggaaatttaaaagtattataagagcttatcaggaaatacacatactcatgaaaagctgatgttgcacactttattgccttcaaagcaatcactgcccctacttagaagtttaaaaggcaggtatccttttgtcttagagaaggcaggccctttctccagtctcaaagggatgaaccataaccaacctaaacaagttattgcaatcccatgcccctttgctgaggtgagagtataaccccattctaacctctggtaaatgaagggaaattttattgtcattttctagagacagacaaaccttatcaaggacaaagcatctttgctaccttcctttcctcaaaaaaacgaaacaaaataaacaaaaccccacacgactgaataatacaatccctttactggtttggacatattataatcaggaaggtgaaaccaagagtataccgaagacaccacaggcctaaggttgctataccaaccttggaaatgcccatcttcaggctttttatatgaaataattaaaacctatctgcaggggcacaggtaggttttatcatattagtgatgttttatttcctaaattagatggtgaattccggatttactgttcccattatgctttaaaatatgtatgaattagaattttatattaggaaattatacttgattaaaaaatactcagctgaaattcaacagtatttccaggggaaaatacactctgattttcaaataatgtaagcacatgaaaaggtgctcaacatcatcagtcactagggaaagagatataaaaataatgagatacttcaggtctactaggatggctattaaaaaaaccacaaaacaaaaagtaacaagtgttgatgaggatgtaaagaaattgcaactcacacattactgatgagaatataaaacggtgcaggcactacgaaaaccagtttggtggttcctcagaaagctaacatagaattaccatatgactcagcaattccacccttaggtatatatcccaagtaactgaaagcagtgatttggacagatacttgcatgccagtgtttattatagaattactcacaataaccaaaaggtgaaaataactcaagtgcccatcattagatgaataaacaaaatgtggcatatatgtataattgaacagtattgtcataaaaacaaatgaaattctgatacatgctaacaaatgagtgtatcttgacaacataagtgaaataggccagtcacaaaaggacaaatattatacagttccacttttataaactatccagaataggcaaattcatagagacaaaaagtagattaaaggttaccaggggctgggaagacagtggaagggagaattactgcttaatggtcacagagtttgtctgaagtaatgaaaaggttttggaaatagtgaagggttccgaaaattgtgaatgcaattaacactactgaattgtacacttaaaaatagttaaaatgtcaaattttgttatatatatttcgctacaatttttaaaaactgatgtaatataccacaaattgtatactttaaacaggtgaaatttatgatatgtgaatcatatctcaataaagctgttaaaaaataaactttagaaccaaaatgtaggtatgttgtgatttttttttttacttttttgatattggtaacatctgaaagactgcttaaagtcaaattgtgaagaacttataatgttggaaagattttatacttcattattacaaagtagtgtgattatcaaaagggagtggttcatacttaaaagtccaatgcaatattctagacaagagactcaagtgaagaagcatgaggaacagtaatcaaggtgcaaatataacttattttttagtttgtaaaatatgcaaagagattaaagactagataagccattcactattacagtttccctctttacggccttaaataggcactattagaaagtaataaaaataaatggcaatgaaaggtcactctagaagcactgcctgaagactagcagccttggatattcccatcacaaacaaataagaacactattctttctgctaattttcatcccaaacacaattactgacaacctattaagtttccaacattgctaattctttatgaaagaaaagagacaaacactcctatctgtcctaaagatcactgcctagaatcaggagtctgataagtaaaaaataataataatgctaacaataatgtaatcaataaacgttaagaacagacattacttagtacacattttaatgttgaatctgtaatataaaagacgtgtacaaattacaaagcaaactctatagtgtcttattactatattgaataatatgaaaaagatctacaatgctttttcaccaatttttttctacctcattagaattctttgggattaaaaagacagttaatctatacatttcagtgcaggtagtaattttagatgaaagtaaattttgtgtgtcagaatatcaaggatatatagcaaacaaacaaacccacccaccagccaggcaaaggggatcacgcctgtaatcttagtacctagggaggcagatacgggaggatagcttgagtctaggagttggaggctgcagtgatgtacgttcatagcactgcactccagcctgggcaacagagtaagaccctcctgctaaaaccaaaccaaaccaccacttattgaattctgaacacaaatcaaataactgccatatttttatggtatatattagataaggaacatataaaatgttactttaaaatatgcataagaattttcttaacttagttttactaagctaattcctaaggacaatttaccaagcctcaaagaaaagcagtattaattttaaaaaaggagtggtaatttatttgtaaaaataaaacatgtatatttcaggctcttcaatgaatcctcctatggaaaaaaattaacctttaagctcactaactgtcaataaaattttttagtcctaaaaattgtggctatcttacatggctgattaaaattcaatttaatagttgattttatgtaagaaggataaatgttaacttccttaccttgtaatttcatcatctccaagtactgctttagaaactggggagtatctggctggagatgctggtgtctggcccaagaaggaagatgggctaacatggttatcaacaggctgagaagaagcttcaaaataaacaaagtgaaaaatacttcaaacacgaaacaagccaatcagtattccatttatgagtgattaatgtgtaatttatatgcactcctttatatatcagaatttggtagagaagatttactcatcagccaaaaaactggacattatgttgcccaggttagtctcaaactcctgtcctgaagtgatactcccacctcagcctcccaaagtgttgggattacaggcataagccaccacacccagattacttaaagaattatatacagtccaaatttgattgtgaataataaaaatcagaggctttccaataagtgcgaaaagactatgtccttatactagctcagatctgtcaacctaatttacatctatgcttttaaattcacccatagaagaataaaaacctggtaaaaagcaaaaacgaaaaacaagcaaaaactgtcgtccaggcgtagtggctcacgcctgtaaccctagcactttgggaggccaaggcaggcggatcacctgaggtcaggagttcgcgaccagcctggccaacatggtgaaatcccatctctaccaaaaaaatacaaaaattagccagacttggtggtgtggcctgtagtcccacttactcgggaggctgaggtgggagaattgcttgaacctgggaggtggaggttgcagtgagccgagatcgcatcactgcactccagcctacgtaggtgacagagtgagatgccctgtctcgagaaagaaaaaaaaaaaaaaaaaagcaaaaaccaaacgttggttcacttcaatagtaataaataccacatataggttttccattctagcaaaagctaataacagaaaattatagtgattcctgaccatgctttctaaagacacaggtaggtaacacatggcagctgtagcttacaaagacataagacacttgaattattccaatcattaccaaaacacagaggaagcaatatttaactttcttgaggcttcaactatgataaagttacaaagcacttcaaaagtagctgtattatttaattatcaagcattaatctcttttttattaaattagagcatatcttctatggagggaagcagcatactacgcactggagtacaaaaatgcaggaattattagttcaaattactatagtggccagataggtaacataaaggaataaagtgaactggatgaaagacaacaggaaatgactgaaacgatagtattttagagatgcagtgtatctattgatattacaggtttgcagtatccaacagcaattgtttcctatccagttcatatataagatgctcgtttgtatttgagccaaaggactttctaccaatggctcttaactttgaaagtccaaagtctttcctgggtggtcagtaagaatatgggattttcaagtgaattggtatgtagccctcaatcaatagatacccacgtgaacctctacaatcactagcctgttaaaaatccagagtttactgatttttgactcttaaattcttttgctgcattttcatatttagatgaaacaaaaaaaacaactagacaagaaatccagtcaaatgcccaaaccagaaaatatacattttccctgacacatccagactatccctttagtcaatgcatcctttctggggcagttaatctcacatgtaccacatactctcagacaacagagactaaaaattaatgttcctatgaaagaaatgacggcctcaaagaaggatcagataaaacagtactatttcttataccccaaatcttatgtaaaaaggtcccccagagaagcacaagagtgcctaattcatttttcttatatattaagatgaatgattcaacactataagattttatagaaaagcaagtagaagagcttgaagtgagaatgggaaaagactggtgtccaaatcagaagtagcaaggccatgcagctaaagagaatataagttaaaagcgagaaaatatatactgtaaaaaacaggaacattttaatgtcggcagagaaactgtattctctgttagattcaacagacttcttttttttcctacttttattcctgagtatcatattttgactaccttattttggttataaacattgtggctctttatcttctatagttcatgtataacttctatgatcttccctatttcttttactattcttgctaaaaatatttttctaactagtacaaaaattgttttccaattttgacatctgctcacttgcaaggctgcctctgtgagaaacatcccctccatcaatgcttgacaatcaccacaaaaaaaaaaaaaaaaaaaaatcaaatgttatctagtcctcttaggtaacaagagaaagaaaatctgaacattcttgtgtctgctaaggaaaatgcattcagaactaaaatccttcccaagaaaactccagggccagacagatagatagcttcattggaaaattcaacaaaacatctagagatgaaataacattctgaaacattacaagacagaaaaatttcaggacactatcgttaagttcatgcttgtgaacacagatgtaaacctaaacaaaatataagcagttcaaaatcaatgatatataatatatattataaggatgtgggttttttccccccacaaatgaatggtttagcgttagaaaatcaatgtaatttatcacgttaacaaaataaaagagaaaaatcatctccataaataattggataaaattcaatacttacaggataaaaactccccataaaccaggaataaagattaactttcttaatacaaaaagggtatctacagaagacctgctggtaacaccatatacaatggtgaaatactgtgtcccccagtttgtgaacatgacagtgatatttattatcaccatttctgttcaacactgaactggaggtcttaccaatgcatcagacaagaaaaaagaaaatgaacagtataaagataggaaagaaggaagtaaaattcattgttcacagatgacatggttatatacgtagacgatctgaaagacctataaaacctaacattaacaaatttagcaagattgttgactaagcaattaatatacaaaacagatatttcctatatatcagttaaaattagaaacatttacaaagtagtacatttataatagcatgaaaaacatcaaatagccaggactaaatctaacatataaaacctctactatacaacactgcagagagaatgtaagaaggacttcaataaaagaagagatattcatattaatggactgattaagaaactcaatttaattcttcctaaaccgatctgtaatgtttttgatcctaaaattaaaaaggaaattcaaagacccaacataatcttgaacagtaacaaaattaagatttactttacatcaatatttattataaaattatgataattaagagactgcaggtggtacaaagacaaatagttcaatgaaacagaagagcctagaaataggttcatatatatgtggtcacttaaaagaaaagcaccaatgcaattcagtggcagaaatggtctttcaataaatgatgctagatcaattatatatctgcatattaaaaaatctctcattacatgcaaaaattagatcaaaatggatcggacctaaatgtgaaaggcaaaataataaagctcctacaagtcccttatgacctaaggataggaaaaatttcaacaggtcactaaaagcactaccttaatagaaaagactgataaggaattaaaaaattttatccatcaaaaagtaccattgttttgagggaaaacataaactcagtgaagacatctgcaacagatgtaactgattagagttatttctcaaatacataaaacttcctttaaatcaataataaaaccaatggaaaaatgtaaaaagatttgaacagacattgcattgaacaagagtcaaagcaataagcacaggcaaaaatgctgaaaataattaatcatcaggaacaaccagcaataaatgaataaataataatcattaaaatcatgagataactttatacatatacatactattcataattaaaaagatggataataccaagggttggtgaggatgtagaaaaactggggtcttaattgcctcctatactgttgaaattgttcagcagtatccgctggagactaaacatatgcctaccctgtaacacagcaacctcactccatgagaaatgactgcttatgtctgacaaggatgtgcaaaaacatccacagcagctacactcataaaagatcagaactgtaagtgactcaacagtaaaatgaaaaaaattgttgtacacttatacaatggaataatacatagcagttttaaaaagccatgtgactgatcattaagctaaattcttaaaattggtacccttactgaatatatgttttaattcaattaaaaattaaataaagaggtcaggtgcagtggctcctatctgcaatcccaacactttgggggcactgaggcaggatcacttgaggttaggagcttaggcaacatagtgagaccccatctctacaaaacaattttaaaaattagctgggcatgctatcctagacacttggraggctgatgtgggaggatggcctgagcccaggaattcaaggctacaaggaactatcatcgtgtcactccactgcagcctgagcagctgagtgagatcctgtctcaggtaaaagaatctttttatagactttccccatttctttactgggtatgtttttttatttttcttacagagtcttgctttgtcgcccaggctggactacagtggcgcgatctcagctcactgcaaactccgcctcctgggttcaagcaattctcctgccttagcctcccgagtagtggggactgcaggcacttgccaccatgcccgggtaattttttgtagttttagtagagatggggtttcactgggttagccaggatggtcttgatctgctgacctcatgctccgcccgcctcggcctcacaaagtgctgggattacaggcgtgagccaccgtgcctggtctcttttttaagagatgggtctcattatgttgcccaggctggagtgcagtggccagacacaggtgcaataatagtgcactataacccccaaactcctgggttcaaacaaccctcctgcctcagcctgccaaataattgggaccacaggcacgcaccattgtgcctggcttttttcctttttgatgtgaagaagtcttaacatggtaggaaaatcagctctcggtgatattaagcagagaaaaggagcagtgttagagaggtatcttaagactgtaggacgatccctcctatttccttcagataaggagtatgtaaacatgttcgtgtgctgatggtaatgatccagtagacagaggatttgattatgcaagagagagaagggacagctgcaagaacaagattctctgcagacaacaaacaatgacattcagtatacaaatggaagacctggttttcaacaggaacaatgacagtgactcccattaaaacacaagtgaaagtcgagtttcggggtaaaaatataattacataggtatatctgaaagtggaaaaataaggaaattctcttctgggtgcttatatgaaatatgaagtgagatcatcattcatgaatagtagatggcaagtgaaggtttgaggggagagaaaaattctttagagtgggagagtgaattagggaaatgtagtaggactgcaggcaagagtaaggcactatctatgatttatggccatacgtaaaaagcasaattttgtgcttttctccatggttctgctttttaggaaccataaatgaaatagcagagtttgcctgcaccagtgttgggggattctgctgcgaagaagaagggggcaaaggacttgaagatgtgcaatgaagtgaacatgagaaaccatggaatctaagctaatacaaatagaaaaattgagacaaggggcaacaaaataataatgtcaaatgactgaaggtcaaaatgagatggaattgctagaatagaggtgaatgaactgagggttgtagtcacacaatgggatgatcaaactggtattttagaggtgatgaaagttaataattatagataacaaaatctaaagtattatcttagaagcaagtaactgagttgaagtggagggcaggatagtcagaaagagatgaagaaaccaaaaagtcagggtgttggatgaatcattagtgtggtttttggacatgaccaggaatgacagcatgagtaacagtggcaaaacgacaatgggccttcgcactaaagtcttcagtgactacagccagactgatgaagagaacaccagatcaccacagccagggatagagagtaagctgaatagcctgacagcagggtgactgtgcaggcttcagaagaactgacaagtaaaactcacttatgtaaaaaaaatttaaacacaagtgcttttcaaaaaacacaaacagattgtttatgaattgcatatgcagaagtgtacaacgaaacccacatctacagttgcctaagaagggaagggactggaagcaaaatattatgatcaagttgaaactgcaaggtgaatgtcagctttttcataatgctttattagttcaataacagatgggggaaaaagtaacataatcagctgggctcggtggctcatgcctataatcccagcgctttgggaggccgaagtgggtggatcatctgaggtcgggagttcgagaccagcctgaccaaacatggagaaaccccgtctctactaaaaatacaaaattagcagggcgtggtggcgcatgcctgtaatcccagctactgaggcaagagaatggcttgaatctgggaggcagaggttgtggtgatccgagatcacgccactgcactccagcctgggcaacaagagcgaaactccatcttaaaaaaaaaaaacaacataatcataatcagggcactaatactcaattcgtggaacaactgtcacaatgtgcacatggttattagataggcagcatttaaaataagatacttgaattgatgaataaaatggctcattatttaaaaaatacacaaagcctttatataaagtttatgtgctagaggaagtatatgtaagaatttcaaataagtagcaaggttcttttctttgacacaaaagaagtataagacaccatccctgtacatcagacaggttaaatactattaaggaaataattcaattatacttgagcaattaataaatcaatgagcagataatgaagatacattactggagggcagtatgtagatttcaaaatgtcatgtttttaactgataatgattagtaatataatgaatcttgacagttctaaaattggaagcactgttactttaaaaatcaccaatatttctaaaattctacaatttaaaaaaggagcactcaaaagcaggttatacccagtacgtttaagatctttattatttacgggttcttcaaacattaactcaatgcaaagaacaaatacagatttcatttttccaccaatacaaacacattaaaaaatatacttaaatctcttctcagcttatatatttaaaaaactgaatataaaatggccaggtgcggtggctcacgcctgtaatcccagcactttgagaggccgaggcaggtggatcacctgaggccaggagtttgagaccagcctggccaacatggcgaaaccccgtctctactaaaaatacaaaagttagccagtcatggtgtcgcaagcctgtaatccctgctactaggggggctgaggcaggaggatcgcttgaacctgggaggcggaggttgcagtgagctgagattgcaccactgcactccagcctgggcaacagagcgagattctgtctccaaaaaaaaaaaaaaaaaaaaaaaaaaaaaaaaaaatatatatatatatatatatatatatatatatatatataaagtaagaaacctaaaaatacgtaagtactttaagaacaatttaatcaactgcaacacaactgaactgcatacaaatataagcactagaacctgaaagtacaaagataaatagtatctctcctcatgtacctaagagcaaagaaaatccctttaattttagatatattgtaaatcagtgtttctcaaagtgcaggccatgaactagcagcaccagaaacctcagaattacagacatacctcagagatattacagttccataccacagcaataaagcgaatattgcaataaagcctgtcattataaattttttggtttcccagtgcatgtacaagttatgtttacactatattaagtaaggaatagcattatgtctaaaaatacaatgtacaggccttaatttaaaaatactttattgctaaaaaaaaaccgctagcaatcatctcagccttcagcaagttataatgtttttgctggtggagcatcttgccttaataatgatagccttgatactgagggtggtagttgctgaagggtggggtgcctgtgttaatttcttaaaataagacaaaaatgcagttggccatatccactgactcgttcttttacaaaagatttccctgaagcatgtgatgctggtttgttagcattttacccacagtagaacttctttcaaaactgaagtgaattctcttaaaccctactgctgctttatcaactaagtttatgtaatatcccaaaatcctttgttgccgtttcgataatgttcacatcatcttcacctaccaggattagattccatctcaagaaaccactttctttgattatctataagaagcaactccttagttgttaaagttttatcatgaggttgcagcaattcagtcacatcttcaggctccacttctaattctagttctcttattatttctaccaatttgcagtaacttctgccactaaagttttgacctgttccaagtcatccaagagggctggaatcaacatctttgaaactcctgttaatgctgatattgtgacctcctcccatgaatcatgaatgtccttaaaggcatctagactggtgaatcctttgcagaaggttttcaatttactttgcccagatccatcagcggaatcactacctatgacagctatagctttataaaatgtatttcttaaatagtaagacttgaaagtcaaaattattccttgatccatggactacagagtggatgacaagttagtaagcatcaaaacaacatcagtctccctgcacactgccatcatagctcttgggcagctaggtgcattgtctcagagcactaatattttgaaaggagtgttttttttttgtttttttctgagcagcaggtctcaatagttggcttaaaatattcagtaaaccatgctgtcaacagatatgctgtcattcaggctttgttgcttcagttatagagcacaggtttcattacagttatacagaacaggcagacaggcttagcataattccttggattttctggactggtaaatgggcattggcttcaactgaaaatcaccagctgcattagcaactaacaagaaagtcagcttgtactttgaagctttgaagtcaggcactgacttatcctctctagctgtgaaagtcctaaaaggtgtctttttccagtagaaggctgtttcatctacattgaaaaattgttgtttggtgtagccacttccattaagtatcatagccagatcttctggataacttgctgcagctcctacagcagcacttgctgctttaccttgcactttcatgttatagagatgacttctttccctcaacctcatgaaccaacccctgctagcctcacatttctcttctacagcttcctcacctctctcagccttttcagaattgaagcacagttagggtcttgttctggattaggctttggtttgaaggaatcttatggttggtttgatctatctagaccacttcaaactttgtccacaacagcaatcagattgtcttgctttcttatcattagtgtgttcactgtaacagtacttttaattttcttcaagaacttttccttggcattcacaacttggctaactgcagcaagaggtctagctttctccctttattgccattgaacatgccttcctcactaagttaaatctttttgacatataatgagaaatatgcaacttttcacttgagcactcagaggtcattgtagatttattaactggcctaatatcaatattgttgtatcttggggaatagggaggcccgaggagagcgagggagataggggaatgactagtcatcagaggagcagtcagaacacacacatttatctattaagcttgctgtcttatatgagtgtggttgtggcactccaaaacaattaaaatagtaacatcaaagactagtgatcacatattactgtaacagatataataataatgaaaaaagtttgaaatattgcgagatttaccaaaatgtgacacagagacattaagagacatgaagtgagaacatgttgctgaagaaaaaaggtgctgataaatttgctcaattcaggattgccataaaccttcaatttgtaataaatgtagtctctgtgaagtgcaataaagcaaagcccaataaaatgaggtatgcctgtactttgcttgttaatagaatgaacggcttgttcaagcaaatttctgtgctcaagtggaaaacttagaacaaaacaatttcaatatttgcaaatgttctttagtgactgttacttacataaaagtttgaaaatcctttaaatgtaactactactataaaataataaaggtgaaaaggatcccccccttctaattataaaaattttgacttaaagtagattttaaaaaatgagtagattaacatgcttaattgtttctttaaaaatatttgcataatgtttaaactttattatactgagaacatttcactaatggcatcacaactgaagaagtaagataaatttaagcaaacgtatgctaacagacttacagttggtgatatcaggtggtgcatagccatcattcatatacatacttgtgggttttgccactttcaaataaacaaaatcagatgtgttctttaaggcagttactgcttcttcatgagtaacttcttctaaacatacgttattcacctaaaaaaagtcccaaaagacatttatgacatattcacttgttctctgagttttggaaacaatttcacgaaaagaaagggaaaataagagagtggtttaaggaaaataaaggtatgccgaaagaaaatacccatgtttgatgtctatgatctcagtaagttgtttatcatgacatgtgaagtcgttgaatgttaacagaatagcccatcttgattccagtctccatacctcctattctcccagtcttgattttctctcattcttaggcatttaggaatgtgtgtggatgcgttttagacatttttatctttaaagaaatgaaaacatactaaaatttttgtttttatgttaggatttttaatgtaaggtaccttagagactgttccatgttgggacacaaattaatagaattactacattgtaacaaaacagctgcacagtagcccattgtgtggctatatcataatttattaaagatcatatctgttaatattcccatatttagattggaaaactattagaacacaattgagcacaaatatttaaattgttctcctaaatggttttagtaaatttatactcactaccacagaatatgagagtgcccatctacttagacctttgccaacattaaacattatcaactaatttaaaaaatctgtaaaatgatgcatcttttaatttatacatcaattagttttaaatttctactttcgtaatactcaagttgattttttttcaattattttttggccattcacctatcttctgtatagaaatataactgatttttaggtagtgatgtatcctgcaaccaatactaaactaatttattagttctattagcaggttcctaggatagtctatatacaatatgatgacatcagcaaatatagttttatttcttcctttctttttttttttttttttttttttttttgagacggagtctcgctctgtcgcccaggctggagtgcagtggcgggatctcagctcactgcaagctccgcctcccgggttcacgccattctcctgcctcagcctcccaagtagctgggactacaggcgcccgccactacgcccggctaattttttgtatttttagtagagacggggtttcaccgttttagccgggatggtctcgatctcctgacctcgtgatccgcccgcctcggcctcccaaagtgctgggattacaggcgtgagccaccgcgcccggcctatttcttcctttctaatctgattttctttttctttttcttttcttattgccctggatagaatctcaactataacactgattagaagtggtagtttatgtctttctagcaatctgtcaatttcatctaagttacctcaggtattagcacatagttactcataatagtctcttgttttccctctttcatgcttgctttcagaaatttcagccttctctcttttttcttggctggtctgaaggtttgtcattttgttgatttttttttcaaaggaccaactttcagttttgtctgtcttcttacatcttttctattacctatttcattaatttctgctctaatctttattatttccacccttctgtttgctttaggtttggattgttcttctctttgatacattttttttttttgcaaataagtaaaacattatcaatgtttccgttttaaattaccatgtattaacaatattaactttaatatatttttcactttttcctaatttgtacctttatagttgactattgcagtttttaatattttcacaaaaaaatgtaaaggtcacagaataataatttcccttcactgatgattaacattgctttgcagagtctcagcagcatggtcatttttatggctccacattaccatgcaaagcaaggactgcctgcattttgaaatacatattaaatagctgtggcatactgctgaaatacacattaaatagctgtggcatactgctgaaatacacattaaatagctgtggcatactgctgaaatacacattaaatagctgtggcatactgctgaaatacacattaaatagctgtggcatactgctgaaatacacattaaatagctgtggcatactgctgaaatacacattaaatagctgtggcatactgctgaaatacacattaaatagctgtggcatactgctgaaatacacattaaatagctgtggtatactgctgaaatacacattaaatagctgtggtatactgctgaaatacacattaaatagctgtggtatactgctgaaatacacattaaatagctgtggtatactgctgaaatacacattaaatagctgtggtatacttctgaaatacacattaaatagctgtggtatactgctgaaatacatattaaatagctgtggtatactgtttctttggtggcctacaataagccatgcatcctggtattcacacccttgtaaaaatctctttctacactgaattttgcttgtccacgtaactagctttagccaatgaggtacagtagttgtgaaggaaagagaagattgataaaaacaatgtaccagtgcttgtcttctttggaaagcttacttttggaacctagccaccatcctgtgtgaaactcaccctaaccacgcaaagagaccactggataattaagcacctggctaacagtcccagctgagttcccagctaagagccaacttgcccaccatatgtgtcagccaacctaacagtggattttgtggcctagtacagcaaagacaagttgttcctgccaagccctatccaatctgcagaattgtaaacaaatacatgagtggtgttttttagccattaatctctgtgttttctcacatatcactagatacctgacacaagagctgacacaatttgctgagggatttaatgtgaaatgtgtaagatgatgatcccaaagttttacgccagagaaaagttatttgaccatctaccagagtcgtcttctacacattaagaaacagtgaccttgggagtgaatagtaaaaaggagaaaatggacaaggagtgagttctggattacttcaatgtttagaggttacagatatgaggaggcaccagacatcagaaagacagaatgaagagtggctactaagaagagaaataccaagataaagggtgactattaggcaaatgaaaaagtgttagaaggaggaaggtgtgtcaaactccagccagataagtcaattaagatgaggactgagaattgaatgattccagtgtaattaagagaacaaaagcctcactaaaagttgatttaagagagagacttgccacaatggtatcagcacaggttgctgtctcctaccaccaaagccagttctagagaaaccataaaggaaaacatggtagccaagaaattaaaaagtaaaactgagaaaactagtgcaacagaaggctgtcttgactgtgtttgtgtgtgagtgatgagtgatggtgagatggtactggttatagtttgaggaaagagtggtgatcttagctgtgaaaggataagttagagaaacatagttcaagttctgctctttccttttcgccatcattaactaaaaaaagtctccttgcaacaataaacagtactaaacaggatgtagaacaaaggaatcttttatatattgctgatgtaaatttttacaagcagcctggaaaacaacaggatggtttttaaaaagaatgctactagtaggataatcaataatcccatgacagtcaagtaaaattcttgtacatgttcaccagaacacacagcagctcttcccaggaaaattattcataataccaaaaaaaaaaaaaaaaaaaaaagacttaaaatagatttttaaaaaccagtacttgctagtatatttttaaaaaccaacttcctactatgccagatccagtttatgtgccttttcagattctgctaggccttggctgcttgctcagtggagagtcctgactattatactactttcatcttgtctcctgcccttcccagttttctgagcctcttctggctgggactgggcatggctgatgtgttccacacagtgagggccataacatgtcacaaacctatgtttgacctgtcataccactgcaactctaccatttttgggcttgggtgaagtgttgtgccatggagtataggagctggcttccctagaaactgcgcccaggggagttgggtaacacaatccaaaagcttgggacaaataacccctagggggtagacaagagacaggagaataaaagggccagcagataaacctttctttcttttctctggatggctggatgtaaggtttatgatgcccggatggtttttacagtgtctgcctagaagactgttatacatgacaagcaacaagctaccttataaaattacagccagctcagacacattctaccttctattggctctcgttcattctctgcttcactcctcatttttactcactctagccttcttgagatcacacagccaaataataccttagcactttagcttttcttcagattccgtttccctaaggaacatggactgagacagttattgattgatatggtatggctctgtgtccccacccaaatgtcatcctgaattgtaatccccatgtgttgggggagggaccttgtaggaggtgattagatcacggaggtggctccccatgatgttctcttgatagtgagtgagtctcatgagatgtgattgttttataagcatctggcatttccactgctggcacgtctctctcctgctggcatgtgaagaagggcgtgtttgctttcccccaccctccaccatgactgtaagtttcctgagtctggtgagtcaattaaaccgctttcctttataaattacccagtctcgggtaattcttcatagcagtgtgaaaacaaactaatacactgatgaagactggacaaataaattgcagtacagacatacagtggaatagtatgtagagataaaatgaatgaactttagctctaagcaatgatatgggtaagtctcagtaaagcaatattgagtgaaaaaaatactggagatgaaagtctcatacagtgcaatagtgttttgaaaaagcttcaaaacaaataatactaaacaaaattatttaggcatatgtatataattaaactttttttttttttgagatgggctttcactctgtcacccagactgcagtgcagtgggacaatcacagctcactgtaacctcaacctcctgggctcaggtgatcttctcacctcagcctcccaaggagctgggactataggtgtatatcaccaggtctggttaatttctgtattttttgtagagacagggttttgccatgctgcccaggctggtcttaaactcctgggctcaagcaatctacctacctcagcctcccaaagtgctaagattacagacaggtgtgagccaccacacccggcctgattaaacaatttttaagaagcaaaggaataagaaacacaaaatggttgatgttctaattcttgggctgggtaattactaggtttcattatactattaagtgaagtaaaataaaaaagggtcatgcataaacaaatgatgacattgttttataaacctaaggattatgatgaaacactctgtgcatacaagccctcaacaacaacaaaggaataaaaggaaaagggaggaggagctagcagagaaaagagaaatgacaaataaagaattaccaagaatcattttttaggatttgatacagcaaggctagtatttgctaatttaaacatcatttagacctttttggtatggagaaattccagtatctatcagaaaaataaacagactacaaaatgatttaaaagacaatagatttcttatacttactgctaaaagtttatctccaatctgaagtttgccatccttatgtgctgcacctccttcaattattttggttacatagatgctattatccccaggaatatgctgatttccaacacctccagcaatgctaaacccaagacctgtttggaaaacagttctagattctcatccataaatatgaacttaagcccagaaagaaatggttgaaaactacaaggtaattattccctcacactaatattttttaaaatagaaaagaatctatttagttatctactagtatatgttctgcaatcaagggacacttagacatacagctgctcctagagttacgaatagattccttttatcccacatgttccttcttagtatcttttcgcaaatgcacttgttattccaaagtgacattgcgaaattatgttttacttttgtttccatcataattatgcttacctacacttttaatattttcacaagaacaaaattattgagaagaaataacaacattgtctggtgatggtgggcagaaccaacaggctttaaaaatgtgaatacctttgttcttcttcaatattctatgaattaacaattttaagtaaggaatttctgtaattcctaaatcccatagcttcaatatcagataatttctcagctctccattcctttttcatttgttgacatcctccctcttccatgaagccacatattgaaactactatttccatttatcctcaagccatcaatgttttaaaaattcagcaatcacatcttaacagtcctttactgcagatgtaactgctcataatacatattataaacacttcttcttttaacttagcctgtgtacctgcatttaaagtattttgtagattatcacaagttaatagcaatactaaacttcaaagtgttcaaggacacaaatatttcactcttttaatgctagaagtcttcaatataagaatacttaatacaaatagggacatatccacttataaaacaaatagatattttgttccctacttttaaaaactcttaaaaacatgctgagcaaatattgaatataaaaatcataaaaaacttataaatttatatatatgctcactgcagtaaaatgtataaaagcatacatcaataaacgtaagaattttgggccaggtgcagtggctcacacttgtaataccagcactctgcggggctgaggtgggagaactgcttgagcccaggagtttgagaccagcctaggcaatgcagggaggcctccgtctctacaaaaaataaaaaaaatcagcccagtgtggtggtgtgtgcatgcagtccaagctacttgggagggtgaggtgggaggatcgcttgagctcaggaggctgaggctgcagtaagccatgactgcaccactggactccagccagggtgacagggcaaaaccctgcctcaaaaaaacaaacaaaaaaaccccgcaaaaaaaggaacttttcaaatgctgcaatcttggtagaaatgtaaatattctaaaatgctacgtaagacaaaaatcagtagaaataacggagaaattaaaatccactcaagttctgtagaatattactaatactgtacttggaatgtatgtcacagataaagttcataggtatatttaactcagagatttcttaaagatttatcttagtttgacttaccacatacctttaggacctttaatgagctttatttccattattttttctgacactggtttccttctttttacatacaagcgtacaatagaccctgcttctttcaacgcttcaactgctttgctatgtgttacatcacgaacatctacttcatttactygtaatatacagtcattgaccctgagaaaacaattaaatattaaaaataaaaattaaatataatttaaatataaattttccactttaccaattttttgttacttcttttttaaggtaaagagaattataaataattctggagtaattccagaaaacataaatgaagaaagtatatcaaaaactaatataaacaaatacaaacatttcccaagggccagcaaaaggaacaaaagaaatagtgaaaataatagattatataaaaatgttaaataataattacagctaccatttgcatacttcctgcatgcttattctgtgtaggcattaagacacactttataaaaatagcaaacatttatttagcactaaccacatgccaggcactttcttggtattttaaccctcatgacacctgtaagcttaatatatattttaatccctatttcacagatggagaaactgaggcacaaagaatgtaaataactttcctaaggccacccagataataagtgacagagctgtgattcaaagataagaaaactgaggctcacatcacgagtttaaggtcacagagatagtgtgaaaactgagataaagtaaaaataattttctgagtgcctattccaacctatatattagacataaaacaattaagttattttttgaaatttatataaagattaggtcacttaattcaaaggtttcgtaggtaaagaacttataatttgccatggtgttatgttttttaaaagtctgatttgttcctagtcttagccttttccctagttctggtctctttgattgcatggtattccaccaggaaaaaaagatggtcatctcaaattgggtagagagggtaaacaaaacataattaaaatattaaaactggtcctgacaagcttctatatctaacagaatcaggaagtaaatgtctacatttacatgaatggtcaaatgattaatttttatatctatttgatttcattaatataccacctgtcatacccagtgagaattataaagcttagaaattcaaaaactgcgtaaggcatcaacgtccttaaaataagatgctgtttttaacagactacataaactctttagtcctaaaacttcagggtatttgaacaacaaacaaggaaataggaaaaatgacataatttatgaccctcaaaaaatcaaagtttgcaaaatatatcttccaaaatggaacactaaatttaaacagagacaaatgttattttcatctagtcaataagaaaatatattatttaaagtttgcatatagtctttgtggtgtgggattcwacatggatgtgtgatcctctatcctccgtatcttaaataagtttatatacatgtttcccagccagagaggaaatggaaaatattctgtgagtgtacttaaataagtttatacacatgtttcccagmcagagaggaaatggaaaatattctgtgagtgtatctgaaaacacaaagggaaactcatgatttctayaaatatgctcacaaagatttaaaccatcaaccaaatytgttattcaaaatgttataatatctaagataaaactggagtctaaatgaaaacaggaacacaatgcttagagcataattatctcattcattgacttgaatgttgttaaagcatctaccctatgctagttatcatgatcgtgtttgttatttgtatttatcccttatccagtctgcttcaagaaaaatacacaaagtggattcagcatcacaataaaaagcgcaaaacataccgcaatcttccatcttgggcggctgctccccctgtgataattttggtaatgaaaatacttgagtcatctccaatgtgtgggttgtccgtacctcctgcaatgctgaaaccaagccctgaatttccctgaggatagaagaaaaaaaattgagactgaatatgatttatctttatggacaggttcctgtcattaaaggacgcagaaactgtactaacataaggaacacaacaaataaaggtatatgggtgagtaatataaagattctaaattaaatggacttgttctggaggaaagtcctttcagaggcattactgctgaacaggtgaggttcaagaaaatacaccaaggacttttgaagtatactccacagttctttctttaaaagtatgtgcaacttgtcgttggattagtcacccatctgcagaggtgtcactgtaagtctgtttcttttagactgcacctcagccatgtttggtagggcacatctctcctaagagacaaatgctgaagtgatcttcccgctgttatttctgagtaggcaaaacccatatactgttttagcctttaaaaaagggggtggcgatggtgcttttcttctgctaacttgacatcagcttatttttaaatgaccaaattgtggctgctaagtgatagctgccatcagtccctgacatgtttaaccaatatacccgattagcaaaaggcattgtttcacactgactgaaagaccaacctgagaacttaacattggtgaattttcttgacagcaaagtaaattttgccaaagcagctctactttttgcttgttttatgaactggagaaacaagatttctgaatatgttcttcacagaaagggttcractgctacaaaaagcctttaaaaataattgatttaaccaatggtattaaaaaatgtttatttcttgaagaatgttctaactgaatttcaggcaactcaagtaagcaaatatatgtggacctatcatttaactgttmgtattaaacagtgtaaacacccactctaccaccatttgtcttaaaattctattttaataaaaaaatgtttttcaatctaacttcatgaattacctgaatcttaagaacagtaccagtggattatgggaggttaccaaattacttaggtactcaagttcttcaaccagtgaaaaatacaatgtatagtcctaactaaacaaaaggaatttaaaaggccctgggaaaagataaaaaatcaataatataaaaagttaggagacatcacaaactactatattaaagtatgtacagtacattaatactgtgcttacttgaatattactccagtagccacccaacttgagcaagtgatccgaatttaagtagatggcaataaagatatacatgtaagagactctctcagatttatttttctcagattctattccaatataaataaatctaattatctaggatttcagtcttgagtatacacacatttagttacttaagaaatctgcttgtgtgaaacactagatttccataaaatgctagccagataaggtggcattactattataacatacaataaaaactgaatgcagatattcttttttcttttttttagacagagtctcactctgtcacccaggctagagtgcgatctcggctcactgcaacctctgactcctgggttcaagtgattctcctgattcgagtagctgggattacaggtctgcgttaccacacctggctaatttttgtatttttagtagagacggagttttgccatgttggccaggctggtcttgaacttctggcctcaagtgattcacccgcctcggcctcccaaagtgctgggattacaggcgtgagtgcagatattcttgagggaaaaacatatcttaagaaaatttgcacatctgaattgcaccttcaagtcattttctgattgggcaagtataccataattagtttttaatacagctctgtctgttagaagtatggttattttgctagaaaagaaaattgatataatgaccatgttactagtatactacttacttaatacgaacaatacttcattatcatatgcatataaacaatataaacaaaattaaaaagcaagaaaaatctgagaaactatcacaatctagaggggtctaaggcggcaggataactaaacgtaatgtagtttcctggatgggcctctgagagagaataacataaaaagtaaggaaatagagacttcagttaataataatgtatgaatacaggtgtcttagttgaaataaatgtactctagtaatagaagatgttaacaatagaggaggctgaatccagagtaaatggaaactcttgggactatctttacaacttctttgtaaatctaaaactattgtaaaataaaaagtttattaaaaaaataaggttactaaagaaaaggcaaatgttttgaaaataccttggccaattttatgaactgggaacttagaaaatatcatatagttctgtttttgagagatctcccttggattctgtatgaaaaagcagtatattacaaagttctctagaacaacagattaagataatagtttttaccctttcaagtgtgatttcttcatattcataatctgcatctgtgccattaacctacaggggaaaagaaaagcagctcagaaacttcagagtgtaaaatccaaaatggcaaggcaaaatttttgtatgatttattaatgaaaacctgttgaatgcgacagtaatcaaacacaatagcttcattttaataattctggggaagattttcaaggaatggaaaaatacaaatgtgattaatgagttgacaacattcgtggtatcatgactttcaaatccaggataggtacattcagcttttaatagtttcaacctccgatccttctctgtcttgatccacacatctaatcagttaccaactgtttctgatttgaacaccttaattttttggaaaatcatcacctcttcactctcatttctaatacctttgttcaggccttgttcaacctcctctggaatggaatactgtcaatgcagtctgcctaatcgcttagattagtattccccactgcccaaatcactgttttaaacagctggatcttttttgttttgtttttttgagatggagtctcgctctgttgcccaggctggagtgcagtggtggcgtgatcttggttcactacaagctccgcctcccgggttcacaccattctcctgcctcagcctcccgagtagctgggactacaggtgcctgcccaccacgcccggctaattttttgtatttttagtagagatggggtttcaccgtgttagccaggatggtctcgatcttctgacctcgtgatccacccgcctcggcctcccaaagtgctgggattacaggcgtgagccaccgtgcctggcaacagctggatctttttaaagcccataacatacttcctctaaaactttcacaactctcccttcctagaaatatccaaactctatgggttggtaatcatgtcttcgaatgaactgaccccaatgtactacttcccttcattcttcacctcttcataggccttacataccaaccctttctgtgaacgacttgctctttccattacatatcctgcaattttccacttcgacatctggaattttgtgcctcctcggtcacaaatttcacttacatgttttatgtcaaaatcagtcaccattcaagatatcttggtcacaatttatctccctccaatttatttcctagtctctcctgaaagaagttaactcctacagtaaaggccactggtgaaacaagtccctggaatcagatgaacatgggtttgaatccttcctttaaaatttctcgtgatatgaggctgggcaaaactctatctaaatcaaatgtggactgtgataaattctacttctgaagatggctcacatcttccattccagacattcttttgcaatataactaaatcaccctaccatcaaaaggagtctctttcctcttcaattagatctaggcaagccctgtgactagctttgactaaaataaatgtggcacaaatgatgctgtgtgatttctgagactaggtcatctgatgcctgatagtattatttgcctttgcttggaatatattttctttagaacccagcagctataacatgagtaaaactcaaacagcctacagagagatctaaccaacagagaaccaaaacccttggccaaaagccccagctacactcctaaccagcagtcagcaccaccaactatcagccacgtgaataaggctatttggacctcccaaccttgtcaagtgccctaacccacaccatgtaaagcagagccatccaattcattatgagaaaaaatgaactgttgttcttttaagcccctaagcttcagggtagtttgttatgcaatgatagataactgcaagagaaataacaaaacctacataagctactttgctttcttaaccatactataaaatgtagcccttaattcaggtctaatatagggaccaggagtttcttccttgagaacttttgaagcccatctctactacccttttgggttcttaactcttgtgattctcctagattcaaaccctattactattttgttccctcttctttctcatctatagacattttcctcttagagattatatgttataaaggcatttatatagagagagttgggatttcactctgttacccaggctggaatgcagtggcataatcatagctcgttgcagcctcaaactcctggactcaagtgatcctcctgccttagcctcttgagtagctgagactacaggcacatgccaccatgcctggctgtttacttttgtttttcatagagatggggtctatgttgaccaggagctcgcttgcttgctctctctctctctctcacacacacacacacacacacacacgtaaaatctctttatctcagtttaggaggagtaacttcaagagctgtgttgatcatgtctgtgcatctagagtacgggaggcttacctacttgacaggaagtcctttgttacgagtaaaatttttatttgcagcaatatcccctttcttattctaaaggttatttgcatcatcttgtttcttactcaagacttgctaaaagtctatcagtctttatcgaataagcagttttgacattattgatgaatctattacatttcatggtattactttctgtttttaacagttctttagtcctttgattttctaaaaaagatttttgagttgaatgctcaatttatgcttactctattctatttttagaaacctcaaaatttaccaattttccttggcatatggattaggccaaatcccacaactgctagctgcactgagctccatttttgttcatttgtttatttctaaataatctaaaattttattttcgaaaacatttccaaatgagtgtgcttatatggcccttttggcattaacgtaaaattttgatactgtgaccttatgatttctgccttaaggaatctgagatttttcacctttaagtttcctcacaaggtaggtgctcagtaaatattcctggtgcttaatttaatgccaattcatgatgtaggtttctaagcagcacataaaaggggctttttaggtagcactgagtactttactaaaaatacaaaaattagccaggtgtggtggtgcacgtctttaatcccagctactcagggcgggggccaaggggtggggtagggtgggggctgagacaggagaagcacttgaacccaggaggcggaggttgcagtgagctgagattgtgctactgtactccaacctgggcaacaaacagagtgagacactgtctcaaataaataaataaataaataaataaaataaaataaaataaaaagaactcgaccctttttacaatagctaaaggaaaataaaatacttaagaatatacttaaccaaggaggtgaaagacctctacaaagaaaactacaaaacactgctgaaagaaatcacagatgacacaaacaaaaacacatcccaagctcatggacaggtagaatcaatactgtgaaaatgactatactgccaaaagcaatctacaaattcaatgcaattcccaccaaaataccaccatcattcttcacagaactagagaaaacattcctaaaattcatatggaaccaaaaaagagcctccacagacaaagccaaactaagcaaaaggaacaaatctggaggcatcacattacctgactccaaactatactatgaggccatagtcatcaaaacagcatggtactggtataaaaatggacacacagaatgaagcagaatagaaaacccagaaataaagccaaatacttacagccacctgatctttgacaaagcaaacaaaaacataaagtggggaaaggacaccctatttgacaaatggtgctgggataattggctagccacatgtagaaaatgaaactggatcctcatctctcaccttataaaaacatcaactcaaaatggatcaaaaacttaaatctaagacctgaaaccattaaaattttagaagataacatcagaaaacccttctaaacattggcttaggcaaagacttcatgaccaagaacccaaaagcaaatccaacaaaaacaaagatatgcagatgggatttaattaaactaagaagcttctgcacaacaaaataatcagcagagttaacaggcaacctacagagtgggagaaaatcttcacaatctatacttctgacaaaggactaatatccagaatctacaaggaactcaaacaaacaaatcagcaagaaaaaaacaatctcatccaaaagtgggctaaggacatgaatagaaaattctcaaaggaagatacgcaaatggctgacaagcatatggaaaagtgctcaacatcactatcgggaaaatgaaaatcaaaaccacaatgtgatattaccttacccctgcaagaatggtcatcataaaaaaataaaaaaaaatagatgttggcgtggatgcagtgaaaaggaacacttttacactgttgatgggaatgtaaactagtacaaccactatggaaaacagtacagagagtccttaaagaactaaaaggagatctaccgtttgatccagcaattctactactaggtatctacacagaggaaaataagtcattatatgaaaaagatacttgcacatgcatgtttatagcagcgcaattcacaattgcaaaaatatggaaccagcccaaatacccatttttccatgagtggataaaaaatatatggtgtgcacacacacacacacacacacacacacacacacacacaccatggaatactactcagccataaaaaggaatgaaataatggcatttgcagcaacctgaatggaactggagattattattctaagtgaagtaactcaggaatggaaaaccaaacacagtatgttctcactcataagtgggagctaagctatgaggatgcaaaggcatgagaatgatacattggcatttggggactcgggaaagcgtgggactggggtgagggataaaagactacatactgggtacagtatacactgctcagatgatgggtgcaccaaaatctcagaaatcaccactaacttattcatgtaaccaaacaacacccgctccctaaaaacttactgaaattaaaaaaaaaatccaaaaaacaaaaaataaaatcctgaagtttcccatcctttaaaattaaaaaaaaaaaagaaataaaaggcatccagaggtaaactatctctatttgccagtgacatgatcttgtatatagaaaattcaaactacataactaccagaggtaataaatgagttcagcaaggttgtaggataaaagataaacacctaaaagtcaattatattcccatatgctagcaataaaaactccaaaaataaacaaaacaattccatttataacagcatcgtaagaataaaatactggctgggcatgatggctcacccctgaaatcccagcactttgggaggctgaggcgggctggatgacttgagctcaggagttcaagatcaacctaggcaacatggtaaaaccccatctctaccaaaaatacaaaaaaaaaaaaaaaatagccagtcatggtggcacgtgtccgtgttcccaactacatgggaggctgaggtgggaggatcatcttgggtctgggaggtggaggttgcagtgagctgagattgtgccaatgcactccagcctgggtgacagagtgaaactgtctcaagaaaaaaaaaaaaaaaaaaaaagagagagaatacatagaagtgaatttaacaaaagaactccaagacttgtacacagaaaactaaagaacattattgaaaggaattaaagaaatatacccatatatttacagttaactgattttctatatggttgccaagaccattcaatgcggaaagaatagtcttttcaacaaacagtgatgctatccacatacaaaagaatgaagttggacctctacttcacattatacaaaaatcaactcaaaatgaatcaaagaccaaaatctaaaagcaaaaccataaaactcttagaagaaaacttaactctaagtctttgtgatgttggattatgcaatggcttcttacatacaatacaaaaagttacaaaagaaaaaatataaaaataatggtttttagactcaatcattatcacgaaattgcggcattttctaaagttttatccacttaaacttcaacaaaaatgtagcagtatatttttaccccatactgtcaccagcagaatgtactgacaaactttttgctcttttgataacataatgtttaagatgtattaattgttttaatttgcatttatgttattaactcacctttttctacttttttaccttaacaaattatgttgagatattcacatatcataaaatctacctttttaaagtatgcaattcagtagtttctagtttattcacagagttgtgccatcatcattactttctaattccagaacatccttattaccccataaacaaaccctgtacctattagcagtcactccccattctgccctacacccaccacctggcaactgctaatctactttcagtaactatggatttatctattctggaactttcatataataaaattatgcaacaagtggacttttgtccctgatcaatttaaaattacaaagttataactaattattttcgtatatatgaatgcacaaaaaaaacctggttactaaaaatctagtcattcaattagacttctaaaatgatttaaatatatggcactgtgtaagcaaccaatggtcagagacaaccttttgtgaaagttagccatcataatttctgaattaaattacgaatttctatttcaaaatttctgctttacaaaaggaaaaaaaaatgaccaaaggaggaccatactacttaatttactatagcaattacagctatagtatatagtgatagaacatcttaagagaaatgtattagagaaaacaatgccatggtcttcgcatttgtatcaaaaaacggaacaggaaaggcagaattacttcaatgtggggaggaaatggaacttacgtaagttggtgtttccaagctatctgtgttgaccagtactgggggaggatttgcctttaagaagaaattgtaaatgtgttaacaagaaaataaaacattacatgttcatgttcacaatgttagaggcataggaaagacttgctatttcttaagttataatcttatatgagctttttatatgttaaataatatatcctttctccagcaccaaacagaaaaaattatgtataagcagttaaaacagatttgcttttaagaaataaattgctatttctgctaaagcagccatgattttcttaagttttacacagatcaccatagccttctcataaaacccatgaatattctttagtgtaaccaataactcttcctaggttgcttagaaatcattgttttctcttcccaaagatacagtaaagatttcaatcatttcatcacccaggagaaaattcttccccacagtgaactgtttttaaacaaggaaaaaaaaaagttcatcacagaaagaaatcaattgtaaacttttagaaactaaaaacacactcttaatgtaaaaacccgattattttcagctgcaatgactgctttccagttattctagaccactcacagaattaacagtgatttattacagcaagaaaaataagcagaataacacacacctagttaagtttggattgaaaaaaaatcttggttttctggttaggttagaaattattatgtatatgaaactaaagaataaaatgcaataacaaatgaaaaatataataaaaatctgatgtaattcccctcaaaattctttcttctgcatatttaaagttatgaaagtaccaagtcacataacactttcagagaataaaaaagatgactatcctttaaacaaactttagaagatatgcttacacacattaatggttctacttcaattacctgaggaattatacataaaagctgtataaagtaacactgtaacacaaaataaccattttcttccaaatgtacaggcttttaataaaggggaatattcaaacttcaaataacacattattttcagcacagtaccacagctaaatgatatgacaaaatgcttaaagacaacctagtttcatggttaaaaaattaaacagtatgcatttgggctacatcaagcagtaagttaaaaatgagtagctaatacttcattatatataaaaataaaattaaatataatactttatgtttagtcccaccattaaataatagtctacctttgaataattcggtgaaagtccactcaacaaataaaaattgtacttataaaactgctatttaagcaaagctacccaacttacagacatttgagattttatgaatatttcaaattacttatttcccaatggtatattgagattactcaaactggtattttacgttgctaaaaaaattaataatacaacttcactttattctgcttaagcaattacagaagaaaagggcaagaaagaataggatatttaaagttacaaaagaaattacattttaaaaacactatggcaagaaagccttttggtccctctgccgattttttaccaaacatgcagtggaaaaagttggtttttatcaaaatctaatttataccataattattatgttagctgtttatcagtaccaactcatcatcattttatagaagttaccttttgattctattcatttagaaagtctcgctaatattgaaatatatataaacgaaatgatataaggtgttatatttacttcaaaataaaacaatggaaggttgggagtaggaggggttatgaatcaaatagaagtacacgagttgattgctgcagctggtgatgggtatacatagagttcattgtactattctttctacatttgaatatttctgaaattttgcataataaaaagtaaaccaaaaaatcactttgagccaagtactcagttttaaagaggttaatagctaaagtagttgtgaaatactctgggtcagggttgctattaagatactggcattcagccaagtgcagtggctcatgcctgtaatcctagcactgtgggaggccaaggctggtggatcacttgaaaccaggagttcaaaaccagtctggccaacatgggtgagcaaaattatgtttcttaagccttattaccgatgcttgggtcaaattatttaggggctttttagttcctccttctggaatatccttgcccttttactgcctctacccccaatctctaagtgaattatagagcttcactgttgtccaagttggaactatacacaatggtatataaattttagtaacagaataagcatttctatagcttcctatgatttgcaacatattttcttttatattacttctctagagcctcacacagtccccctgggtaaagacaggtattgctatcttttcacagatggagaaaatgaattttaataataactgtgatttacctatactcaaatgtcactgagtggtagagggaggtatagagagacctagaaccaggtctgagattacagggtcacttgaaccaaggtgcaatgagggctttttcttcatctgaaataatttcacgtagactctttccaagtcttttagttgtagttgtttgattttccatgttacctgttctactactcgctgtcttggttaaggatcccaaagtctttttttttttttttttttttgagatggagtcttgctctgtcacccagggtaggactttttaaaactcaagtttaggccgggtgcggtggctcacgcctgtaatcccagcactctgggaggccaaggcgggtggatcacgaggtcaggagatcgagaccatcctggccccgtctctactaaaaatacaaaaaaattagctgggcttcgtggcaggcgcctgtagtcccagctacttgggaggctgaggcaggagaatggtgtgaacccaggaggtggagcttgcagtgagccgagacagcaccactgcactccagcctgggcaacagagcgagactctgtctcaaaaaaaaaaaaaaaaaaaaaaaagtcaagtttattggctgggcacatggctcacccaaattttaccattctatttcatcaacaaaggatcttgtagtgattgctgctgtaacagactgaagcagccttacaaagtttcagagggcaatattacatttttaaaaatcgtgttaaaatacattctaagatccaattattttaaaataggtcaaaatagtttagaaaatccacttttacaatctgcattgtatttctccttctcagcattgatcaaagtttcattatgttatttgtctagtgtttctttctcctctactcaattatgaacaagtgctttacaagtgcttttccaatgcaaaactcacaaactccagagaattcttcttagatcctaatttgagacacattgcattcaaagttaaatgctatgactgaggtgatcactgcaggttaaaatgattgtaaaaacaaatggggtggattctggaaagaaggtagagtaggaagcaccacaaatctgtttctccaccttgaacacaattttagtggcagcatgtgtctgatgtagatgttttggaacttggagtctactgaaggctggcaacttccaggtgaactgtagttaatttcagtgacctgcaggcttagcacagcagcagctccccacactctatccctcagtcaactgtgtaccgcctgcacaagccacggtgggcagagaaaattacattctccaaatactggagatctgtgctctgaatgctgcttctcatcacaaaggtgcaaacaggccctggatactgctgttccacctcctcctcattgttggaaaccccaccccaacctcccaggctgaactgacttccaggagattgaaagagctggaggcctccccttcctacacaccaattcaattttctttttccccttttgggagccagacattgaagactaggacattaaaaaccaaccacatgtatggaggaaattagaaagtcactgtgcatgcccaggggaaggcataggctcagaaaatatctaagaagaccctacgtttacacctgaggctgatctttgatagcctacaacaatcagaaaaacaataacaacaaaaaaagaaaaccctggagaagaaggagaatctgattttcagagttaccaaattattaaattcaagtgtgctgtttaaataaacaagaataagtggcttattaaaaaaaatataaatcaatataaactgttccttaaaaaaaaataaggctgggtgtggtggcttacgcctgtaatcctagcactttgggaggctgaggcgggcagatcacaaggtcaggagtttgagaccagcctggccaacatactgaaaccctgtctctactaaaaatacaaaaaattagctgggtgtggtggcaggtgcctataatcccagctacttggaaggctgaggcagaagaatcacttgaacctaggaggtggaggttgcaatgagccgagatgacaccactgtactctagcctgggcaacagagcaagactctgtcaaaaaaaacaaaacaaaaccaaaaaaccaaaaaaacccacaaaaacctgatagcaaatctactagacaaagactttattaaagaattaaaagatggccgggcacagtggctcacacctgtaatcccagcactttgggagactgaggtgggtggatcactaggtcaggagatcgagaccatcctggctaacacagtgaaaccccgtctctactaaaactacaaaaaattagccgggcgtggcggcaggtgcctgtagtcccagctactcgggaggctgaggcaggagaatggcgtgaacccgggaggcggagcttgcagtcagccgagatggcaccactgcactccagcctgggtgacagagccagactctgtctcaagaaaaaaaaaagaattaaaagatgtgaacaaaagcaagaaagtgctgtatgaacgaaacggaaatatcaatgaagagaaataaaaattataaaattcaggaaatgagaagtacaataacagaaaattcactggagagattcaaaagcatatctgagcaggtaaaaaaagtagtgaacatgagataggacaagggaaagtactgagtctgaagaacagaaataaaagagattcaagaaaagtgaacagaacctaagggacccgtgagacatcatcaagcagaccaactaatgcattgtgggagttgcatgagaaatgacagataaaagagtagaaaaaatatttgaataatagccaaaacttctcagatttcatgaaacacatgaatataaacatccaagaagctcaataaacaataatgaaatccaacagactcacactgagacacattatactagaactgtcaaaggccaaaaacaaagggagatttttgaaagcaacaagagaagtgacttgtcacatacaacaaatcctcaatgagattatcagcagacttcacatcagacactctggaggtcatatggcagtgggtggaaatactcactgctaaaataagacgaaaaaaacccaaacctgtcaactaagaatcctatatccagcaagacagtccctcaaaattaagggggaaattaagatgttctctgatgaacaaaagctgagggagtttgttatcactagaactgccctgaaagatgtgctaaaggtagcagttcaggttgaaatgaaagaaaactagacagcaactcaaagtcatatgaagaaataaagatctcagtaaaggtaaatacataggtaataataaacactagttagtaatattgtaacaatggttatgtaaatctgcttttggttttccacatgattgaagagaccattacattttcaaatttaaaaaaaaaaaaaacttagcctagccaggcatggtggctcacacctgtaatcccagcacttcaggtggccgaggcaggcagagatggcttgagcccaggagttcaagaccagcctgtggaacatggtgaaaccccatctctacaaacaaaacaaaacagcaacaacaacaaaaattaaccaggtgtggtaggcacatgcctgtagtcatggctattcaggagactgaggcgggagaatcgattgggcccaagaggttgaggctgcagtgagctgtgatggcaccactgcactccagcctgggctacagaatgagaccctgcctataaataaataaataaataagcctaatattaataaacaaagtcaatattggtaaataacgaaaatcaattattagtttaaaagctaacattataactttgatttgtaacttcatattttgtctcctacataatttaagaaacgaacgcattaaaaattactagtttctgtttttgggcatacaatatatgaagatgtaattctgtgacatcaacaactgaaaggggttgggacagagcagttaaaggggcagaggttttgtatattattgcagttaagcttgtacaaattgagattagaagtgtctaggatgttaaatgtaatccccatggtaaccacacaaaatataactaaagaatagacacaaaggaaacaagaaagttaaatgtttcactacaaaaaattaatcaaagaccaaagaagacagtaatgcaggaaatgaggaacaaaaaagctacaaggcatatatataaagaaaacaaatagcaaaatgacaaaagtaagtctttccttaccaataattactttaaatgtaaataaactcttcaatcaaaagacagaaattggcagaataaaaattttaaaatgttccaaccacaagctgtacacaagagactcactgtagatccagagacacaaatatgctgaaactgaaggacagaaaggggtatttcatgcaacagtaaccaaaggagagcaggagtggctgtactcataacagacaaaatagactttaaataaaaaaaaggttatgagacaacaaaggtattatacattaataaaaggttcaatataggaatgtaacaattacaaaaattaacgcacctaatagcagaccatcaaaatgttaagtagcaaaaatgagacagaattgaagaaagaaatggttctacaataatagctggagacttcaataccacattctccataatgggcagaacaaccagacatatgataagtaaggaaatagaggagatgaacaaacacaatataccaaagagacacagaactctaacaataacagaacacacattcttctcaagtgcacatgggaatagaaggaaactatgtcaacctaagaaaaaccatatacaaaacacacacagtgaacatcatactcagtggtgaaagactgaaagcttttcctctaagataaggaagaaggcaagtatgtctgctttcaccacttgtactcaacatgaccactagctgaatagttgaagttgttgtcaaagcaattaggcaagaaaaagaaataaaagacatccaaattagaaaggaagaagcaaaattacttgttcacaaatgatatgatcttatatgtaaaacaccctaaagattctacacaaaaactgttagaattattaaaccaattaagcaaagtagcaggatacaaagtcaatacacaaaaatcagttgtatttcttctaacactgaacaatctaaaatggaaattaagaaaacaattctgtttattatagcatcgaaaagaacaaattttcagaacactgagcctcctaaatgaagaattaacttcatcaagaaagtaaaaaacttgggcaatgaaaactataaaacatgtatgaaagaaattaagaagacataaataaatgggaagggatctgtggtcatagattggaagacttactattgcaaaaatgtcaatattacccaaagcaatctatagacttaatgcaattcctatcaaaatcccagtagggttttcaaagaaatagaataacccatcctaaaagtcacatagaatttcacggtaccctgaaagccaaaatggtaatgaaaaagaaaaacaaaggtggcgggctaacacttcctgattccaaaacttactacaaagttacagtaacagaaacagtctggtactggcatgcagacagacatacagaagggaataaaacagaatccagaaataaatgccatatacaattatcaacctacaatggaycatgatctaaatgtaaaacctaaaacttaaaactgttagaagaaaacacaggctaaaagcgagacactggaattgtcaatgatttcttggatatgacacaaaggtacagacatgtcttgtctgtaatctctgacaagacatgagacccagaatacacagaggaactcctaaaactcgacgataaaaccaaacaccctaattaaaaaatggtcaaggaactcatacagacattttcccaaagaagacacacacatggacaataagcacatgaacagatgtgtcacaaatgcaartcaaaactacaatgagatgtcacctcacacccactagcctggctactatgaagaaaacagaaaataaaaagtgttggtgaggatgtggagaaattggaatccttgtgcactttggtggaaatataaaattctacaactggctggatgcagtggctcatgcctgtaatcccagcactttgggaggccgaggcaggcggactacctgaagtcgggagtttgaggccagtctgaccaacatggagaaacctcgtctctacttaaaaaaaaaaaaaaaaaaaaaaattagccgggcgtggtggcacatgcctgtaatcccagctactcgggaggctgaggcaggagaatcacctgaacccgggaggtggaggctgtggtgagccgagattgtgccattgcactccagcctgggtaacaagagcaaaactccatttcaaaaaaaaaaaaaaaaaaaaaaagsccagaggcagtatgatgctctgctctggacatacctctaaggtaattactctcacattatgcgggagctatttgttaaacttgtctcttgcacaaacacctagtaggcccctagaggacagagacgatgttctattcatcttcaaagcacatattcaaatatcaaaaaagaccatgcacaaaaaattagctcttaaagcattttcaacaatactttaattacatgatagcttttcagaactgatagaaataaaggtttaaaacatctagttttaaagcagagtatttactctagggtgcaaataagcctctggatttaataggctagtatcacagagattatgtgtttacactcccagtaagaagaactagtaactgtcacctactctgtactcagtttctatgtggagaaactgaggctctcagaagttgagtaatttccacaccatcacacgtagaaacaggtgaagctaggaagtggtggagtcgggtaggactataaactccacgttctttctgcaatattaagcagccattaaatattacctttatctgtgccactctgtataataagcataattctgatttgtagaagactttcataaagtacaaacaatatgatcaatgtgaaagtactctgaaaagtataaaagtgttctacaaatcatgaaagactatatactttttaaaaagttttcatctatgtatctttctaatttgcctgactctcaaactcattttaaaggagtcaggttggcgttaccccccattttaatagatgaagggggtataaaactcagagagggtaactagcttgagtggcaaagacagactagattctaaatcttttcttctgtttttatttctaatacatcctaacgcatctaaatgtaaagtagtggatcttttaagaatacatattcacttaatatgttgaaattgggttatatgttagtatgtattttaaattttacttggggacggatattttagtccattattttaattttataatgtacacattgtacttcactaattaggaacacacttattctggaaaatgaggtgcactcattggcttctcacataacacaacaaaaatggtaaaactatctttcatgaacttccgtagtgtatttaaaacctaaagtgaagctatgcagaataaataggtcttttttgtgtgtatcctcaataaatatcctcatttaaaaaaacaaaacaaaacttgttccttagtttgctgtctcagagaaatatgagataacactaaaaatatgggcggctaagattatgtgccagtacctgacgtgcattaagcatcctctccatcactgtaaagcgcctcaagttagtactcctgtctatcttcagtgttacagatgagtaaatggaagtgcgctgtggttaagtgaagtgtgcagttacacaggttaagtggtaggactggaattccaaccccaggtcattctgactttaaaacgtgtatttttataagactatgcaagatctcaacaattttcaaatgcagtgggatgctaagttagggttgcttggagtaaataaatgagagaattctgaataggaaaagacaggctcccaaatgaatataaagagactggtacaaattctcaaaggattccagaaaactattttaacaccaaaaaattgactgaagtgagaagagtaaaataaactttcaattctattaaaaaaaaaaaaaactgtactaataaactctatatatttggaaagatgttacattattatgatgccataataacccttaaactgtttgctcagaattatattttatttataaattcaatttttttcctgcaatatagagagaatatccatttggattcatctattcattgttggttttatgacttaatttttaattattttcataatcaaaaattatatagtagcagtattattataatgattacaattcagtcttattacagtaaggctgaagtcattgtaacactgtaatttcccctagaatccttggttgtatggatgttcccactgacttcactttttaggagaggggaagggcactgagatgtgaataatcacagctgatatatcattttttccccaatggagcttattttgaaactgtttacacagcaaacatatgtttacccagattttaggctacagatcaataatggcaaaaaaaaatctatgggttcatttatttacactttaaatgagatcgtgatctttcacaccaaagatctttattattatctttaataccactaccattattttgactttggataactgttggaagggcagttaatgtctcaagccaccccttggaagtagtaaagctttgaaaaactaaaaatgattagactctctcacatttggctattatttttaaactgttacacataattttttaaaagtaaaattttacaacagatttacagaaaagttgtgaagatagcacagagcattcccatatactcccagatatgttggctattatttttacctaataaatgtgaagtgtgttatctaatcaaataacataagaatgaatatttccaaagaagataaatatataacaggaaacaaagtgttaaataaaatgatacattggtacaagatcaggagtacaatgatttttactaactttagaagaataaagtgttctaaagtaaaaatgtttaaaaactgttttaagcagatttctaagtacaaaggcatgaaaacaaatctaaggttcaatattatgaagttcattgtgtcccatttcacagacaacctaataaaatggcaaatcctgactccacttatattaaatcccaaatgtttaagtccctaaaactactaactgaagcccaaagtaaattaccaaattacaaaaaacagctcaaacagttttaaaaaagaacacaaatgaaacattaaaagcaaatgaaatttttataaagaaaaaagaaactaataaaaacctgtggtatggtgggtaggatgacagtattctcagcagggactggcaggacagggatcacagggacagtgggaggagagggaagaacagcttctgttggctaaaaatcatcaatgacaaaaaatcaggaaaaacaccaaaataaaagggaaacacataacaaaaagctgtgccataaagataaattatagttttcagaaataactatgcaacaggaaaaacattaatacattacactaatataaatgagaaaatattctctagaaattgttttagaaagttatacccccataataattttaatgattctgtaataaaatgaatgcctactctttagatgcttaaatcataataataaaagattatcatttacaatattccttccttctctgggagataagacacttgcttcatagacagactgcaaaatattttttctagcactcagaatacatctcactactttcctctatgcattcagaaaactaaaagtaattttattagcccaatcaggcagacaaagagagtttacaaatccgtgatactaacttctgttatcaagaacagtaataacttgcctcaacatgcctgtaattaattcaactaacattgattgtctattacatgccagacatatctggcaaaaatgaaaaaacaacgtagagagaacctggtataaattaaactaaaaagttcactgttttatctggcttgttatttttaaaaggatgaaactggaacacaggaaagttgtttagtaataagacccatttgctatataaataaaatatcttatatatgtaagaaaaacactaaaatcaagcagatgaggacagcctgccttaacaggccttaaaacaggaagaacaaattgccagactaaaaaaagggcttatcttcattcataaatgcaaaataaaatggcaatgatcttttctgcctaccaaattagtcaaattaagatttattaacaatgtatggagtctcttcaacaatggtgctgagacaactggatatccacatgcaaaagatgaaggtctatagacccccatctcacattatatataaaaattaactcaaaattgattaacaacctaaatatgagatttgaaaacataaaactcttacaagagaacatagggttaatctttgtgaccgtggatttggtaatggaaccttagaaatcataaatgatgaaagaaaaaaatcaattagactctaacagaattaaaaccttttgtgcaccaaagggcattaccaagcaagtgaaaagacagcctacacaatgggagaaggtatttgcaaatcatacacctgataagggtttaatatccagaacatttaaagactcttacaacgcaacaacacaaagagaaacaacccaattaatgaatgtgtgaagagcttgaataatttctgcaaagaaggtatacaagtggccaattagcacacgaaaagatgctcgacatcattagtccttagggtaatacaaataaaagctataatgagagattacttcaccactacaagggaagtgtctaattaaaacaaaacaaaaaacaaagtaacaagtggtggcaaggatgtggagaaactggaactctggtacaatgctggtgggaaatgtaaaatggtacagcttctgaggaaacttttagtggtttcttaaaaaccaaccatagaatcagcatctgatctagcaattgggtaggtaaatatgcactgggtaggcatattcccaaaagtgagagcaaggacttggacacttgtatgccaatgttcaatgcagcatcacacacaacagtcaaaaggcggaaagaaaccacgtgtctatcaggagatgaacggatacacaaaacgtgataatatacacacaatgggtatgattttttttttttttttgagatggagtctcgctctgttgcccaggctggagtgcagtggtgcaatctcagctcactgtaacgtccgcctcccgggttcaagcaattctctgcctcagcctcccaagtagctgggatgacaggcacctgccaccatgctcagctatttttttttttttttttttttttgtatttttagtagagacagggttttaccatcttggccaggctggtcttgaactcctgaccttgtgatccacccaccttggccttccaaagtgttgagattacaggtgtgagccactgcacccagccctaggaataaaattcttaatcatgctagaagatggatgagcctttaaaacattaagtgaaattagccagacacaaaaggataaatattgcatgattccacttaaaagactagtaagttatacatattttaccaataaaaaatattccaaaaaagcttttaaaaatgcatgaaaactggtcctctcacactgctgttggatatacaaattcacacaaactttagggaaagtaatttggcagtaaatatctagagctttaaaaatgtctaaacttggccaggcacagtggttcacacctgtaatctcagcactttgggaggccgatgcgggtggatcgcgaggtcaagagttcaagaccagcctggccaacatggtgaaactccatctctactaaaaaaaaaaaatacaaaaattagccgggtgtggtggcccatgcgtgtaatcccagctacttgggaggctgagacaggagaattgctagagcctggaaggtggaggttgcggtgagcctagattgcgccattgcactccagcctgggcaacagagtgagactctgtctccccctcctcaaaaaaaagtctaaactctttgacttagtaattctagaaatctaccctaaggaaataattttaaaagcctatgttttaaggtactcccataaggtgttctaaggttttaagatagtcttttgaacactgcttctatttggtaaatcgtggaatatttgaaatacccaaaggtgtcagaattgttaagtaaaaaatgaaaactctatgagattgaggctgggcatggtggctcatgcctgtaatcctagcactttcggaggacgcggcaggcagatcacctgagtttaggagttcgagaccagcctggtcaacatggcaaaaccccgtctctactaaaaaaaaaaaaaaaagaaaaaaaatacaaagattagctaggtgcggtggtgcatgcctgtagtcccagctactcgggagggtgagtcaggagaactgcttgaacccagcaggtggaagttgcagtgagcagtgagatcacgccactgtactccagcctgggcaacagagcaagactatctcaaaaaaagaaagaaagaaagaaaagaaaattatatgagattatcatacagaaatttaaaattatcagtacgaacagtttataaattatatgggacattgcttatgacaaaacattaagtaaaaaagggaagatgaaacacataaaaaatggaaagaaatgtctgaaaaattaatctctggggtgggatcatgagtgcctttctctatcgctgcttctttattctgaattatacttttccagttgttgacaaggaatacacagtggcgttattaatataaatgcaaggggaaggatgggagatccattgtgaatattaacagaaaaacaattattatgatctttaagtgtcattctctagaaaacaaactgaaaatgtatttcacactctggactcctgttacctggatttattatttcctgtagaaagagatttttaaagcattggattttgtgttttctctttcttttcaatgttcccagtctgggatgatgaaaagttctgaagattgagagtgatgatacttgcacaacactgtgaatgtacttaatgccactgaattgtacattaacaaatggctaaaatggtaaacttgatgtaaactttaacacaataaaaaagtataytacgaataaagcctccgtgggtttagctcgggactccaatcaccatttatatattgttcctggagaaaaaaaattctgaattccacattatgagctcaaaattaataacaatcgtaactgatactcactgcaatatttacatggccttctaagaatgtttgaaaacccataggttctgacttctgatttatgaatgcataagaaaagcgtggtggttttgtaagaactgtgcttggatcaagtggatatacacatggaaaaatcaaacaaatactgattcctacccttaaactatacataagattaatttcagctggtttgctgacataattgagagaagtaaacaatataaggcttctagaggatgatatggtagagtatcatcacaaccttggtgcagatgacctcctgaataggaaagtgcatgttgctgaagctcacgcagggtgaggaaagcatctgtaggcagggagtggaagggaggcaatagcctggcaaagggtgctggagcctcagcatggtgacgagggtgtctacatggacaaagccgtggcggcagcctgtgtgtggttggaacccaagtgagacagatagcatctatgaggcagtagctgcagtctggcataaggttttgtgctgtcagtggactaaatgggatcttctggagcctgagcagcgtgagaagggcgtccaactagggcagcaatgatgacaggagattgcttatatacagggcattctggtccaataaataaatacatgaaggatactgacagcaggtttccttgcgtcagaaaaggcagttataaatatgaaaagatagaaaattagcatgagacctatggtgttacactaaaattggaggtattggtataaacagttttcaatatatatagataaatacaaaaataaatatagacataaatgtgtgtgtatatatgtgcataggtctgctaactatgaggacctggatgcagctaacagctcaacagcacgaatacacctggcatccaaatcttgatttctaaatactcattctgcaatttaaaacaacacaacatggccgggcacggaggctcatgcctgtaatcccaacactttgggaggcggaggtgggcggatcatctgaggtcaggagtttgagaccagcctggccaacatgatgaaattctgtctctaytaaaaatacaaaaaattagctggacatggtggcgggcacctgtaatctcagctacttgggaggctgagccaagagaatcgctttgaacccaggaggcagaggttgcagtgagccaagatcacgccattccactccggcctgggcaataagagcgaaactccgtctcggggggaaaaaaaccacaacacaaaaccaaacaaaaccaaaccatgggtctttgaagaaatggctgactccagtgctagagctcagcaagcacaagatgtgtgtagacatcttgctgtaccagaagataagggaagtactcaaagaggatgacaaaggacacagaagttggcttgaagggctgccactggccagactgggaacaatctgtaactcaatgataacaatggcataacatccactgaataaaataggaatctgggagcccatactgatataaataaatacatcaataaataaatgaagataagagcattttcttacaacaaaatgctaactaaaaatgtaatgatggaattataaaatcatcatttggcagccatcatagtaatagagtaattcattcaagaaatattaatgaatattaaaacttcctgttgccaagtgaaacgtccattccagtggatgaatgggatatactcatacaaaagtgtctcctttcaaagcattaatgacagtggagaaatctgcagacaatatctgaatcaagtgatcaaagttaacaccaccagtaacgggaaaaatcaaaatcatatatcatgtgataaaatgtaatgagagtacaatacttccaggatatttctaccaaaggtatataacttgaatctaatcattaaacatcagacaaacccaaattgagtgatacattacaaagtaactagctgcagtcatcaaaagtgtcaaagtcatgaaagtctaacgttatttttaattcaattttattctagtttaaaaacaactttactgaggtagaagtgatataaaaaactgcacatatttaaggtatagaatttgatgagtttgcacataggcatacatctatgaagccactgccataatcaaagtaacaaacgtatctatcacctctaaaagcttccttgtgcctctgttgttttttgttttggtttggttcttttaaggacactaaagtttattttttaagtgtttgaaaatgtcacaaatgtaatatgttttcttattaacagtctccagccctaacaataggataatagctgattaataatctactttgatagccaaaataagacaaaagtacatgcttatgtcaaatttcaaagcaaagcacaaaaattttctccactgggcaggtgctctccaaaaccctttatgataaaccatgaatcctttaatgttacattttaatcccacttgtaaccctctgtctctgagcctcttctagaatcaccttctttagacgaggatgtgaataccatttaaaaaaattcccagtttacagcatcttaacccatccccctctctacagggcactgaccaagttccttgaagaacataggcccctgcctcttccttaaggccaacaccgctgagaaagtcaacgacgcatcaacacacacaattccctaatcacaactgataaccaattctggtaacaaacaattacagaacaacaaagtaattcatttagttcacttgaaacaaaaatgcagctctaaacaaataataatcaaatgaaggctgactgatgaggaacagcaaagatatcagatctgatcacaggatgctttgggcaaaggttttagagcagggtaaaactccggggagctgtataagattctaaattagaaaatgtcaaacttaagattctaacataaataatgaagcagcaatatacagtaaccattatattttggttattacagaattcagtatggcattttaaacttgaaaaatcttatataactatttcattagacagtgactgttatgccatcatccttgttttgctccatttgtatcactcaataagatgagatctaaagtttttctgttgttgttttaaaaaaaatcttgaccatgtgactagcaacggtctcagttgtttctatccacagcaacatcatggaatcattagcctctgaggctgccttcagagacttgtttccatggcaacagaggctatgatattaacaccgtcacaaggaaattgtaaatttctacaaaattggatatattgtacatattttaaagtaccttttaaaaaccagtatcaaatggatggctatctgaacaaatgtttaaagtgatttgtttttagagattaattttctctatagctttatattttaaatctaatttaagatcttaaaattataaaagcagcacttaaaacagattttcataaagtggtctgaacactcactacatacagccatttgcatctgttctgcacatccacatttatgaccatgtaccgccctccctcactttgattcattgaaaaataaatgtatattgaatgagcctactacttttattaaagccttttctgcttaaagcactcaagtggttttcattatgtgcatatgaaccctgattaatacaggaagagacagaagggacaattaggagtttactgtaataatccagctgaaaggttattggtggcttaaactgaatggtggtaatggacatatgagcagtcaaatcaagacacattttgaatgtagagttggtatatcttggtgactgatgagaagtctggagtgaggaaggcctattaacactcacaatagccactaaaaatgatcytttatacaagagttcgactcaggtataaaagagttgcaaggctatctaaatatatttaaaaacattttctcactaatttattaaaatgactttcatagcataagatgcaactccaaagacgataaatgaacatactatctgatagctaataatgcttatattttacattaacacgttatatgaagggggtaaactgacctaagaatatacacaaagattcactactgtatctttttaattcaacttttattttaagttcaggggtacatgtgcaagcttgttacacaggtaaacttgtgtcactgggatttgttgtacagattatttcatcacccacatattaagaatagtacccatttagttatttttccggatcttctccctcctcgtactctccacccctcacaccggccccagtgtgttgttccgctctatgcgtccacctgttctcatcacttagctcccacttataagcgagaacatgcggtatttgattttttgttcctgcattagtttgctaacgatgacgccctccagctccacccatgtttctgcaaaggacaagatctcattcatttttattgttgcatagtattccgtggtgtgtatgtgccacattttctttatccagtctaccattgatgggcatttaggttgactgcatgtctttgctactgtgaatagtgctgcaatgaacctaagcgttcatgtctttataacagaacaatttatattcctttgagtatacacccagtaataggattgctgggttgaattgtatttctgtttttaggtctctgaggaaccaccacattgtcttccataatggttgaactaatttacactctcatcaacagtgtataagtgttcctttttctccacaaacttgccagcatctcttgttttgattttttttaaagtagccattctgaatggtgtgagatggtatctcgtggctttgatttgcatttctctaatgatcagtgacgctaagctctttttcatgactgttggccacttttgaacagtgtctgtttacgtcctttactctcttttaataggactgtttttctcttgtaaatttcttgaagttccttatagacgccggatattagacctttttcagatgcacagtttgcaaaaattttcttccattctgtaggttatctgttcactctgttgacagcttcctttgctgtgcagaagctctttaattagatcccacttgtcaatgtttgcttttgttgcaattgcatggtgtcttcatgatgaaccctttgcctgttcctatatccagaatggtactgcctaggttgtcttcttaggttgtcttatagctttgggtttcacatttaagtctttaatctatcttgagttaatttttgtatgcacacttccatatttttagagaaaatgagatatatgaattagcaaatcttttggtaccaatatcttagatggcaaggaaaagtatcaactgtcgtgtcactgtgggttagtaaggatcttattttggttttgtatggcataattaatattcctaatctaagttctttggttctttgtttaaagatgtattatgctgtaatgtggcatgtttctctgattaaatgtcaaagaagctatttaaaagtaagagagaaactaaaaaaaactgcaagccttttgaatgtttatagaaggataaaatatagcacagtagatttataaaaactctgcttaggaatcactgtactcaacgggggcccagtaccttcagaaaaagctgatttttatggtttaaatctgtttttttattcaaatgtcctttggtcctgtcactgcaaacaggtatctttcacataagccggtatagtaaaaaaccaacaatatgttatttgaaccagcttcatatgacttccatgtcataactatctcacaagcaaacaattataaaactaaacacatttttaaacaaatcactaagggtattaaaatcattaaatttaaaacaaaacaaggtaaataggaaaacagatctagcaattaattccattacagaaacatgagtacaagtgtgttagttcacacagacagatcatctagttcatgaatctatctctacctgtgagactcacaatattcagttaaggtttctcatccctccattatgaaaagacagtattctatcagcattcagatgacaatcttgtcctagtaaaggatgagccaaacacgaaacatttcaaagtaaacagacactaaaacttcaatatatggttacataattgacaaatggggataaaattaccaaatgcaataatgtgcttttttacctgatttttatcagaatgtggctagagaaataagcaaaaccacagacttcatgactaataacctaaaatgggcccttaatgcttcccagtaatcagatttgccttgtattattcaccctctacaagtctgtaaggattcaggtccctgttatcactctctcaagttgccttcttctatttcccccacacaaatacacacattttctattgtttctttcctttatttttcctccagaataccatatacactcatacgtcacatatcaacattttggttaatgatggtccacatgtataaaattataatggagctgaaaaatttctactgcctagtgatgtcatagccattgtaatgctgcagtataatgtattacatttgtggtgacgctggcgtaaacaaatatacctcactgccagttgtacagaagtataatacatataattatgtacggtatataatacttcagaatgataattaacaactattttactggtttgtatatttattatactatactttttatcttctgtataattatatacaaaaataaatatacaccgtattcccattaactgacatgtgactgcattttggataattatatttattatctgtcttcttctacttagagcagatttctgttctgttcactcctatatgcccagtgcctagaaaagtgcacacaggaagtatttaatatatatttgttgaatgaataaaaccatgcgactgtcaaaagaaatcaacttaatcagcactctaaaatgacttgggcaatagattgggtaggtacagtcttccttcccctacccactttcatgcaatatacatagtagacattgctaaaaggttatttctgtgtttctgggcagccaccaccaatcagaaggtgttcaagatgttttacagtttgataaccttagaacagaagtttcaaaatgtaaaaaattgccagtttcatgttgttctctatctagcaataatgaattgcctaataatgtcccatttgaaaataaacatgtcttggtcaagcatatttgcttaaaatattttcatcgcttttctattcaaactgcattaggaagtacaacttcttactgagggctcatatttaaaatccatggtgcccttcctctgaggttccactaatttcagcttgggtcctttgttcccctacaggtagctacttctgtaagttagtctcgattttaccttggcattctcattttgcctttccagttctccaatactcatctaaccaatcccatgtagtgtatttttattgttagttgctgtggtttctgtttccctggctgcaccctattaaagttaccaaccctctagctaaaacatggttgcttctccgtatctctagattcctcatttaaaggtcagaatattttgttgaaatgaaaatgatggtggtggcggtggtagtggtggataaaagggtagttgataaagatgatgatgacctcactgatgtaattaatgtattataataagtgctttgcacatattgtctcatttaattctcattaaattttgaaaaagataacactttcatccccattttctacagatgaggagacagactccgcatggaggtaatttgcccaaggtggcacaggcgatatggcagaatataaatttaaatccaggtcatcatcctctaaagatggtacacttacccagtactctttacttatctctttaaaatagttcaaaaagagattttgtctttattgttaccactacattttactgcaaagacaatatatattacctgtaaaaagaaatacatactgcatcaatccttagatcaggggttagcaaacatttttggaaatgacaaaaaaagaagcgttatggaccatgcagtaattgttgcaactatccaacactgctattgtagttcaaaagtagtcatacacaatacacaaataggcatggctgtgttccaataaaactttatttacaagccaggcatggtggctcatgcctgtaataatcccaacactttgggaggccgaggcaggcagatcacatgagggcagtagttcaagaccagcctggccaacatggcgaaacccagtcagtcaggtatggtggtgcacatctgtaatcccagctacttaggaggctggggcataagaatcacttgaacccgggaggtggaaattgcagtgggctgagatcgcgccactgcactccagcctgggcgacacagtgagactctgtctcaaaaacaaaacaaaacatttatttacaaaaacaggtggcaggctacatttggcctacagattgtagcttgctgactcctgctttagctgcttttaaaaaaggagaaagaaaaggctaaataagtcaatgaagaaaatagaaaatggctttaagacacctaagttaacttttactaactataaatggtttaattctgttgcaattcttagtctacaataaaaataagccaattctctctccccaaaaaccatggaagcgacaatttaaaaaacaaggaaacaagatatacatatggaaatttcaagtttcacctacagttctttaaaatatctttaattaaaaagtctatataataaagctgtgctcttacaactgaaaaaattttgcctctatactgaatatagccttccagtttggaaaaaaagtgattaaaatgatatgatttttattctcttttctttgttctcccttcaaaatcctgctatggtacttagtttggctaaagcaattaattcttaatattgatatgcatcttgtttgttttctttctatcttacaaaatactttccaactgatttctttccaaatttataaccctttgatacatcagatcatcctaccaagattagtcagatttatatacagataaatgagggtgggatctgttttaatttaaatgccagtttattgctcttgaacgtggctgttaaaaaaaaattaacaaataattaaacaccargttataatccccaattctttttctcagaacaacaaaacaacacaaattgtaaagcaatcatttggttccactctgtcacagctgtaacttcttcacatttcaaagctgctccagtcaagaagtcagagttttgatttcacagatactgaaaatactgttcagaaatgctacca

SEQ ID NO: 2 - DNA, 98300 bp, Homo sapiens
cagattcaagttgccctgaatatactccaacaagcagtagttacaagtggattttaaaaaaattattattatacttaaagttctagggtacatgtacacaacgtgcaggtttgttacataggtatacatgtgccatgttggtttgctgcacccatcaactcgtcatttacattaggtatttctcccaacactatcccttcyccagcaccccacccccctacaggcctcagtgtgagatgttccccatcctgtgtccatgtgttctccttgttcaactcccacttatgactgagaacaggtggtgtttggttttctgtccttgtgatagtttgctgagaatgatggttccaacttcatccatgtccctgcaaaggacatgaactcatccttttttatgactgcatagtattccacggtgtatatgtgccacattttctttatccagtctattattgatggacatttgggttggctccaagtctttgctattgtgaatagtgctgcaataaacacacatgtgcatgtgtctttatagaatgatttataatcctttgggtatatacccagtaatgggattgctgtgtcaaatggtatttctagttctagatccttgaagaatcgccacactgtcttccacaatggttgaactagtttacagtctcaccaacagtataaaagcgttcctatttctccacatcctctccagcatctgttgtttcctgacttttttaatgattgccattgtaactggcatgaggttgtatctccttgtggttttgattttcatttctctgatgaccagtgatgatgagcattttttcatgtgtctgttggctgcataaatgtcttcttttgagaagtgtctgttcatatcctttgcccactttttgatgggttttttttttcttgtaaatttaagttctttgtagattctggatatttgcccattgtcagatggaaagattgaaaaattttctcccattttgtagattgcctgttcactctgatgatagtttctttttctgtgcagaagttctttagtttaattatatcccatttgtcaattttggcttttgttgccattgcttttggtgttttagtcatgaagtctttgcccatgcctgggtcctgaatggtattgcccatgttttcttctaaggtttttatggttttaggtgttacatttaagtctttaatccatcttgagttaatttttgtgtaagtgtaaggacagggtccagtatcagctttctacatatggctagccagttttcccagcaacatttattaaatagggaatccttttcccattgcttgtttttgtcaggtttgtcaaagatcagatggttgtagatgtatggtgttatttctgaggcttctgttctgttccatttgtctatttatctgttttggtaccagtaccaagctgttttggttactgtaggcttgtggtatagtctgaagtcaggtatgcctccatgtttgttctttttgcttaggattgtcttggctatgcgggctgtttttggtgccatatgaaatttaaagtagctttttccaattctgtgaaaaaaatcagtggtagctttatggggatagcattgaatctataaattactttgggcagtatggccattttcacaatattgattcttcctatccatgagcatggaatgttcttccatttgtttgtgtcctcttttattttgttgagcagtggtttgtagttctccatgaagaggtccttcacatcccttgtaagttgcattcctaggtattttattctctttgtagtaattgtgaacgggagttcacttgtgatttggatctctgtttttctgttcttggtgtataggaatgcttgtcatttttgcaccttgattttgtatcctgagactttgctgaagttgcttgtcagcaaacttcagcccaaaaggagattttgggctgagatgatggggttttctaaatatacaatcatgtcatctgcaaacaggggcaatttgacttcctcttttcctaattgaataccttttattgctttctcttgcctgattgccctggccagaactttcaatactatgttgaataggagaggtgagagagggcatccttgtgttgtgcagcttttcaaagggaatgcttccagtttttgcctattcagtatgatattgggtgtgagtttgtcataaatggcttttattattttgagatatgttccatcaatacctagtttactgagaatttttagcatgaaaggctgttgaattttgtcagccttttctgcatctattgagataatcatgtggtttttgccattggttctgtttatgtgatggattatgtttattgatttgtgtatgttgaaccagccttgcatcccagggatgaagccaacttgatcatggtggataagcttttcaatgtgctgctggattcagtttgccagtatattattgaggatttttgcatcaatgttcattggggatattggcctgcaattctttttgttgtatctctgccaggctttggtatcaggatgatgctggcctcataaaatgagttagggaggattccctctttttctattgattggaatagtttcagaaggaatggtaccagctcctctttgtacctctggtagaatttggctgtgaatctgtctggtcctggacttttttttggttggtagcttattaattattgtgtcaatttcagaacctgttattggtctattcagagattcaacttcttcctggtttagtcttgggaggggtatgtttccaggaatgtatccatttcttctagattttctagtttatttgcacagaggtgtttatagtattctctgatggtagtttatatttctgtgggatcagcggtgatatcccctttataattttttattgcatctatttgattcttccctcttttcttctttattaatcttgctagcagtctatctattttgttgatcttttaaaaaaacagctcctggattcattgatttttttcttgaagagttttttgtgtctctatcttcttcagttctgctctgatcttagttatttcttgtcttctgctagcttttgagtttgtttgctcttgcttctctagttcttttaattgtgatgttagggtgtcgatattagatcttttctgctttctcttgtgggcatttagggttacaaatttccctctacacactgctttaaatgtgtcccagagattctggtacattgtgtctttgttcttattggtttcaaagaacatctttatttctgccttcattttgttatttacccagtagtcattcaggggcaagttgttcagtctccatgtagttgttttgagtgagtttcttaatcctgagttctaatttgattgcagtgtggtctgagagacagtttgttgtgatttctattcttttacatttgctgaggagtgttttacttgcaattatgtggtcaatttagaataagtgcaatgtggtgctgagaagaatgtatattctgttgatttggggtggggagttctgtagatgtgttttaggtttgcttggtgcagagctgagtccaagtcctggttatccttgttaattttctgtctccttgatctgtttaatattgacagtgcggtgttaaagtcttgcattattattgtgtaggactctaagtctctttgtaggtctctaaggacttgctttatgaatctgggtgctcctgtattgtgtgcatatatatttaggacagttagctcttcttgttgaattgatccctttaccgttatgtaatggccttctttgtctcttttgatctttgttggtttaaagtctgtcttatgagagacaaggattgcaacccctgcttttttttttctttccatttgcttggtagatcttcctccatccctttattttgagcctatgtgtgtctttgcaaatgagatgggtctcctgaatacagcacactgataggtcttgactctttatccaattttccagtctgtgttttttaattggggcatttagcccatttacatgttggctaatattgttatgtgtgaatgtgatcctgtcattatgatgctagctggttatttcacctgttagttgatgcagtttcttcatactgtcgatggtgtttaccatttggcatgtttttgcagtggcttgtatcagttattcctttccatgtttagtgcttccttcaggagctctggtaatgcaggcctggtggtgacaaaatctctcagcatttgcttctctgtaaataattttatttctccttcacttatgaagcttagtttggctggatatgaaattctgggttgaaaattcttttctttaagaatgttgactattggcccccactatcttctggcttgtagtgtttctgttgagagatccactcttggtctgatgggcttccctttgtgggtaaccagacctttctctctggctgcccttaacatttttttcctttatttcaaccttggtgaatctgacaattatgtgtcttggggttgctcttctcaaggagtatctttgtggtgttctctgtatttcctgaatttgaatgttggcctgtcttgccaggttggggaagatctcctgaataaaattctgaagagtgttttctaacttggttccattctccccatcactctcaaatacaccaatcaaacatagatttggtcttttcacatagttcttggaggctttgttcatttcttttcactcttttttctctaatcttgtcttctctattttaaccatttgatctacaatcgctgatatccttccttctgcttgatcgaattggttattgaagcttgtgtatgcttcacgcagttcttgtgctgtggttttcagctccattaggtcatttaagctcttctctacactggttattctagttagccattcatctaaccttttttctaggtttctaccttctttgcgatgggttagaacatgctcctttagctcggagaagtttgttattaccgaccttctgaagcctttttctgtcaactctcaaactcattctccatccagttttatacccttgctggagaggagctgtgttcctttggaggagaagaggtgttctggcttttggaattttcagcctttttgctgtggtttctcctcatcttagtggttttatcttcctttgtctttgatgttggtgacctacggatgtggttttggtgtggatgtcctttttgttgatgttgatgctattcctttctgttcttattttaccttctaacagacaggcccctcagctgcaggtctgctggagtttgctggaggtcctctccagaccttgtttgcctgggtatcaccagcggaggctgcagaacagcaaatattgctgactgatctttcctctagaagctttgtcccagaggggcacccacctgtatgaggtgtctatcggcccctactgggagatgtctcccagtcaggctactggggggtcagggacccacttgaggaggccgtctgtctgttaatggatctctaacaccatgctgggggaaccactgctctcttcagagctgtcaggcaggatgtttaagtctgtagaagttgtctgctgctgccttttgttcagatatgccctgccctaagaggtggaatctagagaggtagtaggcattgttgagctgtggtgggctctgcctagttcgagcctccctgcctctttgtttacactgtgagcatagaactgcctactcaagtctcagcaatggtggactcccttccccccaccatgctccagcgtcccaggttgatctcagactgctgcactagcaacgagcaaggctctgtgtgtgttggccttgccgagccaggcacgggagggaatcccctggtctgcctgctgtgaagactgtgggaaaagtgcagtatttgggcaggagtgtacagttcctccaggtacagtcattcacagcttcccttgtttagaaaagggaaatcctctgaccccttgagctttctgggtgaggtgacaccccaccctgctttggcttgtcctccatgggctgcacccactgtccaaccagttccagtgggatgaaccaggtacctcagttggaaatgcagaaatcacccatcttctgcatcgatcttgcagggagctgtagaccggagctgtttctattgggccatcttggaagtgccccccaaggagctttattgagagacagaacagctctcagtgaagaggagacccaaaatacctagctcccatcctcaggcaggtagtcctgaaatgtgtctgagtctggctgagtctgaggtttttatgggctcagaatgtagaaagtgcatgctgattggtctatgggtgggcccagaaaaagcaccatctgattggccraaaggcatcaaagaacttctcactcctggtcatggactctacccagaacaggtagcctggcccacaggcttcaggccatccctggcttgaaggttggtcctcactggggacctaccctttcccgcgtaggaacctgtctgcctcccaccaccatcaaaaccttgaaagcccatctaattggtggaatctaaatcatatctataatcctagttttaagtgagtctgagaaacgtagtttttattctaacatgatctgtaatacagaggaagaggtgagaatgaaagtcacctgctagtggacaatatctagcccaattttatgctttgtctactcagcaaccagatacacccttctatccgtaaacctccccacaatcacaatagcaataaaaccactaccaccaaacataaggtaactcttcctaatatagatgaaaacactgtctccttcagggtcagaatttgtccttgccccttcgaacatactgggatctgattccatttatagggatgcagtgagagagatgggcatgaggagaatcagcatccctttgcaaagtaatgaactcagttgagtccattcattacagtgtcttcaacaaggcaggtagcttcaccaagaaagaagggtctaattctactaagaaaatgatgctctgagattttgaggcttggttttcaattctcaaggtaccattctatcccaataaatatcctaaattcttacaaagttgcctaaaacctgcaacttgtgtattcagatttatcaattgttaatgatatcagtcctatgatgacatgggatgaaattaatttagagtagtagttttcattggagggctgagtgatggtggtgccactgttgttggtagtgatttggctccccagtggatatttggcaatgtatgtccattttgagttgtcacaatttgggttagggagagctgttagtggcatctagtggatagagtccagaggtactgagatatcctacaatgcataggacagccttcctcagccttttgccacagggccaaagaattatctggcccatcaataaggacaaagataagaaatcacagaagctctctgtgtgttggaacaagttttgagtcaagcagttaacgtcagctggatgtagtcactcacacctgtacccccagcactttgagaggctgaggcaggaggatcagttgagctcaggagttcaagcccagccttggcaacgtagcgaggtcccatgtcacatttagaaatttttttaaaaagttaaaaccctgggcttgtcatcattgttctctaatttttcaaaggctgtcagaactgccacctcagcccaccccagtccatttattgcttatttgcattttagtgttctatcataacaaacaattgctaacagatcttgtgttcaacaggcaccttatttcagttgatgacatatgataatttaagtaaatgtattaccactgcatgtcttggactaccaatatcttattttccactggtaatcaagatatcattgcctttaaatccaaactgggtcaaataataaatatcaaattcccagtgttgaagttttatttctttattttttgaacatctttatataccaactattgtatcagacaaaattagtatagcaaatagaaaacactacatatatttcatgtagaaaaatattttggtatgtataaaatcatttaaaagactgaaggagtgaaagtcagagattcaaggaaattttcagtttcaagatcatataactgtagctatgatctggaggtcagaaaactagtgcagctgttgctgctaaccctctccacaactgctcctccatcttgcccttatacctttgaattaagctagtgaatatggattctattcttatagatgattgagcttcttttctgctgttacagctacacgaacatggcctctgcctcccttacattttctacatatcaagatgcccatgggatacctaatacatctgagttaagtaattgtttaaagtttttaaaaatttggtttctccaatgttgttagttttatttaaatatttaatgattcttggttgtctatatatatttgtgttcatagtatataatacgtagtgttgatggccagaattgatgtactttgtccaaataagaagccctrttcacctggcagagaataaatgcaagttttcattataggtatactggttctgatggttgtgtgtttgtttgtagggttgaggaagttggtggtatagggaggttacatgtgagtaggctcttctttatgatttatgagtagtttctatgctggatcttcctatttcagctattaagacaactgaaagtcagtgaggttactatcagtctccttcctataaacctgttttccattctggtaatctctgaagttagacttcccccttagtagagctgtatttgaagttttattcaggagagaaatgctattttcagctcctctgacaacagaattactatgtggctcttttccttctaatgaattatccagtctattgtccaagtctcagcccttctcacaaccctcattgtctcttacctaagcgttatgcagagaatgtattggaaaaactcactttagtgattcttctctttgatgattcatcacctggatgaatttattagctccttagtctgttggattttgttggcaatgtggacctacttccagaactgtcaaaattcctccatagccctcaaaagtctgctggtgacattactctcaggtttatagcaatgctatgattttatggatttatttctatttgtatatttcttctgtgatttctgtgtattttggggagggtagtgaggtaattcacaagttcaattagtttaattagttgtgaaccagcactattatccttagatttacagcaaactaattttactttcttggtttcttaaaaaattaatcaggatctgcagtttctctctcaacaaaataagacaattcatttttttcttcatttatcttattttactttccctargcacttcatctctttaccccctacatcttggatttggttaccgtaatttagaattatgacccctctagtttgcatatccttgcttaataaaactgtattaaatcccacaatctcagtgttgacaattattcacaattaattctaacttattttctttttctcttacatcattttttcattgcatgtcctctaatttcttggatttaaaagacttttttcttagagtaattttggaaatagggtacactgttatctgcttctcaaaactttaagtaaccagacaggttattaatattatttccagattctgggtgatgaatcagaggctcaatgttgcctttttttagggtaacacaaattcagtggccaagcctagaccmaaattcggatctccagactcttaagtttgctgtcttttgtatacatatttgtttctttttcttacagtaggtgtccacaacaagctatttattttactatcttttgttggagtagtttgaaagaccatttctgaatatagaactctgcttttcataattattactgatgcttgtgcagtcatatttagtttgcttaattagacagaattgtggacattaagaatattatttggcaaaatcctacattgaggcagtttgtgctygctgttttttggaaatgataattattatataattcttcttctttgtgtagtcatgcataaatatcttgaatttgaatacctggcaactagaataaaagagaaacatgatggattacataacataaatattctaccaagaagatggcagagcattaggagactcaaaattttctgagttaaggctgggtgcagtggctcacacttgtaatcccagtactttgagaggctgaggtgggcgatcagttgaggtcaggagttgaaggccagcctggccaacatggtgaaaccctgtctctactaaaattataaaacttagccagggatggtagcaggcatctgtaatcccagttaccagggaggctgaggcaggagaatcacttgaacctgggaggcggaggttgcagtgagctgagattgctgccactacacactccagccrgggcaacaaagcaatactccatccccctacagctcccccaaaaaattctgagttaagaatgccaagagtaatttatcacatacgccttaaagatgttcagcagaatattattggagatgctattatagccagtttacaaccaataaagacaaattctttatatgacatcaaaatgtaatttcctttataaatatgggtgcaaaaatcaacaaaatactagcaaactgaatctagcatctataaaaagatttatacaacatgactaagtagaatttatactagaagtgcaaggttgattaaacaaataaaaatcaagcaatatagtaatatactatattgaaaaaataaagtacaaaaatcacatgatcatctcaatagacagagaaagagtatttaataaaattcgaagctctttcatgataaaaacagttggcaaactaggaacaggaaagttcctccacctgaaaaagggcatctttgaaaaactatagataacataagactaagtggaagactgaaagttttcttcctaaagtcagaaacaagacaaagaagtctttccctcaccacatttattcaacaatgttctgcaggttctaggcagagcaattaggcaagaaaaagcaataacaagcattcacaaaagggagggaaaagttcaagccccttcatttaatatcatttcctggaagttgcacgtactgtttctgctgacatgcaattggccagaacttaactgcataactccaagcaacatcaagaaagttggtatattatgtctttattctttgaaaacttatgcccagttaaaatttggagcttccatttttgaagaaaaaggagataatgggtattgggaaacaaccagcagttctttccatgtttattgaatgcaggtcaaaaaaaggaattaggtaatttttttcttttctttttaccctacttttcttcttcctttttccctccctctcttccttccctccttttctccttctttccttctcttactttctttcaatacatgaattgcaaaagattaataacstaaatgcaatattgtcttctggattggatcttggaacagaaaaaaggacattagtaggaaaattagtgaaatataaataaagtgtttagtcaacaaaactgtactcatgttagtttcttagttttgataaatgtattatggttatataagatactgatattagtggtagctaggtgaaggatgtacaaaaactcagtattattattgcactttttggtaaatctgaaattacttcaaaattaaaagttaaaaaaaaatgattgctgatatccaatggccacaggtttggaaaactagaaagaattcttatccactcttggtggtatatatattagtacagacttttttttttttttttttgagacggagtttcactcttgtcacccaggctggaatgcagtggcgtgatctctgctcactgcaacctctgcctcccaggttcaagtgattctcctgcctcagcctcccaagtagctggaattacaggtatgtgccaccacgcccagctaatttttgtatttttagtagacacggggtttcatcatgttgggcaggctggtctcgaactcccaacctcaagtgatccacccgcctcagcctcccaaagtgttgggattacaggcgtgagccaccgcacccggcagtacagtttttctagagcaactaggtgttatttattaaagtaaatgaattaatacattttgattctgaaaatctccttctagaaattagttttacataaacacgaatgccagattttgaatttctcttttagatgattcagcataattgctccaaataaatctaaaaggctattgtcaaacagtggaatatttggatttataatttcatagataagactatcagtccatgatatggttggtgtttaaagtagaatggaagtgaaattcccagagtggagtttttaaaataaccaagttcctaggattttaactggaagaataaatatctgaaaggcaatgaggagtattaagcatgggatgccacttctgcaccttgagaaaatgaagtatggaaggatgagtggttttcatttgagagggctgcagggtaactgtttctatttcagatgaggaggtaaaaagaatgggcattgaaaaggaaaaatgtttactaagtaggttatacattttggaatagaagtttctatagcacaatagaaaagtttgagaggtcacatggcaatgatagtttgggtgagagtgaggcaggagaatagggtgtggaggcagggaacctaaggatgtgtcactccgacttcctaagaactaaattgaaaggaaacccctaactttccatgcctaagtaacaaaaggaccagaggctactccctttgcaaacccccactttttctgcagggcagatgggaaattggctgtgggcagcaaatcagactgattgcaggagagtcttcctttgcatagaagtatcactttgtaacttcaccatctgcaagaaatcaaactgattgcaggggaaatcttcctttgcatagaggtataccactttgtaacttcaccctagcctctgattgattgctttttgcaccaatgtttgcacaggagcatgacctttgtaacttcacttcagcctctggttggctgctttctgcaaccaatcagactgattgcgcgttacttcatttacatgaggtgagcattaggtggccaataggaagcttctagagggtatttggactcaagattctgtatccgggcccttgagccgctgctcaggtcgcttccgtacagagcgtgctttaattttcaataagtccctgcttttgttgttttgttgcttcattctttctttgctttgctgggcgttttgtccaattctttgttaaaaacgccaagaacctggacaacttgcagtcacgatcctctaccggtgacaatatcatttaaatattggtagtggcttaaggtagcaaacatccctttgtggaacgtttactcagtaaatccttaaaaaacagatcagaaacaaaaactggcctcccagggatttggactcaggaggtgaattaggcgcggagagggcggagcctttggggtttatgggcggaattgcacagggtttggcggggatctctgctccgccttggcactactcggctccgctcgcctccgcgcggctccctgggctttcactcggctctgttcggctcctgctcgggaagggtgcgcgggggcgagtcctgcgcatgcgccctcaattcctgctgctctcagggctgcgctcagcctcgtgttttcacttccttttcagagctgtatccgggtcgctgctttccctattgtctgaggcagccgccctcgcgctgtgcaatttctggtctttcgttgcttctggtccaggctaataaagtttttctttctttaattttttttcttctagttttaacgggagaaattaactccccggggccgccgggttgactgcgctgcctgggccggaggtcttctccggccagggagcgctgtgggaaggggctcgagcggccagggccaggcgaggccgggggggcggggggttaggggaccgcggggctactcttgggagcgcccctgtccggctggctgcgcgccggttttaaatagcatctttcggacttgtcttcgcggccccagtccccgacctcggcgctgcctgggctcctgcagcctctccctaagtcttctccaaacgaccacctcacggattccttagtaagtgtatccgaggcctctgcggcgagaggtccatttcagccattctagaagtcagggccggtgggagcagggcaggggtgggagagtcctgcgggaaagcaggattggtggaccctcgccctccatggtccgcgggaatgaagcccgcttgttttattccctgatttttgccgtttttattgactgttacgatgtctaagtgggggattacgaggaaggtgcagaaacatctcgaaaagatgagcaagagggtcagcttcgattttagctggtctgagttggcgttggcagcatcagggctggagctgcctttgaaactgcccgtggagctgtccagccctccccaccctgcttctgcaccccaaccttctcctgaccccttttgctgagaactcagttagacaaaaattccttgtgcgaggtcatctttatgttctcttagcaccacaactctcccctgtgtttggtgtgattatgaatgacaatgtaatttttttctcttcacagtggatcgcagctccaagaggaggcaggtgaagcctttggcagcttctctgctggaagctcttgattatgatagttcagatgacagtgattttaaagttggagatgcctcaggtaaatatttccttctctcttcccctttcccagctttctggagttaggcttatttttagactttttaaatcggttttgattaaaatgccaattttaagtgaaagcacgtaaacttcatttattttgtccatttgatttcccattttgcctttagatcctgtcactagacctataattgcttctgttttcctcagagataattagcagtcaggggaaggactttttccaaagatgcaaaaggatttctctgttttacaccttaaaatatatttatgcttatattatagaggaaaaaactgaaagatatcccgaagtagaaaagtatcctgagaggtgtgtggaccattaatagtccctgagcagggttcttcttttttcagatcacttgacaatctcttaggggagttttgctttttttgtgtattagctcttttactagaataaaattgaccagagtaagagttgcacttcaaattatagtaggtgctggaccttgtggattgggcctttcagatgtctctgaagtataagtcatgcatgcttgctcactatatttagtaattttaaaaactttttttaaaggtcgtatattcacattgtactaaactggaaaacagaaaagtatgattttcctttgtattttctgttcagtgtaccttatgtatatatacagtttcaattgaaggaatctgagaaacaaaaattatgtttaatttaaatgttttatgggaaaaatactgataaacatgaacaatgaaaattatgtgtaattccacctcttttgaaaattttaataaagtgagatgaaaatttaaataaaatgagaagtaaaagcctttccagtttcatctcttcaacagtttttaaatatacttccagagagtttgccgtggttagtcacatctctccttcttctggttttcccttgtctttttcctgctagggatagtaggaagggatgaacgaaattatattactgttgctacttttagtagcatcaacagcagaatttgcattgtgatttactgataactttttgtttgcataatctcacttaattttcacagtaacttagtgaaggagataccattttacaggtaacaggggtattgagtttaaagaactggcatgaggtcactcaggcagtaacggatccaatggatttgacttcagaatttagtctgtttatctgcttggatcccaagagttgatggacggaatcttaaacagaaactgactatttggttactaattgaattcatccgcagcaatcaaaaattgataagtttatcttgattaactgtttttttatcctttgcttctcagctctttatctcccatttagttggtttgctgatatttggtatttccaaagaagggaaggggaagggaaaggaggtaaaatttaaatcttagttctcttggtaaagaccttggcagataagaatattcctggctaggatgtagttttggtttgttatggttgtggttgtaaactttgacaaacatagttgggtcgtggaagttacgaattctttgaatatgggaacaattctaaaacttacattaagtattacattattatgtgacaataaatcttgactttatggacaatttgtttccaaggtttgttcattgagatggaatattcacaggtatcacttctttttcaagtggtaaaacaatctgatacaaacataaagtactttctcaaaatattttatgatatcgagctaagtagagatttctgaccttgttaaatcctaattatagttgaagagaactgttatttgtgaaaaatgataggatgagttttgttaggttgatatatctatatatcccttaaacacactaaaaatatttactttctgttccctcttgtaatataatatctagtatgctgcactcataatttaccttcctggccccctggggagcttaaatttgygatctgtggtctcaggtcacaaatttgtatgtatagttcttggtatttattgtaaaagggaatttagaagaaaatgattgtatttaaaatgatyagtagtcaacagaaattgaatcatatttttgactcttgttttaggtgcattgatgctctgcatagctgagatattsgcttactctagattaccattgttttccatttgaatcttttctgtgcctgagatagtatatatttagttggagtcttgtagagaataagacattagtcctatcactggtttccaaacatgttgaagttgtggattcccagccctacttacraataggagattaaattggaagtagagaaatggtagctaaacatctgtctgatcatatcttctttcaaaacaacttctagaaatgactcattgaatgaactacggacttccttagaacttaatattaaagtggttagattcgttggccttaattttggctaactggattccgtggatcaatttcttcttaccttcatcttgaaatctgaaattctgactataaaactttttatatttctgtttggttttaagaataaatatagaaaacatttgcagataaacataatttaactctatcataaaatagaaacaaatcaacattggtaaagaatgacccacccataagattggcaagtgattacgagcctgtacctttagaaaattatgaaactgaagatagtttatattttatttttaatgcaaaagcaaaagtaagctkctcatttttgattgaaagcagtcaataaagtttgaaatgagtaagtcctaaaataggatatatatgcattattagaattatggtgataaccaccagaagaaccatatgtagaaatgttaggttgaactatatggaattaccagttttgtaggtccaaaacacacagtcaaatattagcaatttcatggttttacctagttaaagtgttgatatttgagacttgggcatagggttgggtgtatgataggagacttatttacatttggttatctgctacattaattgaatgttttaaagaatgtttacatctttttaaagatgcagacatgtattasttctattaaccagacagattagccatgctctctacccctatcccccaccaggcaaagtaaaatggggttaactttagatcttgatcaaaagttagtttagttaggccatattgccaggaaataatttaatgagaagtgtcagcctgagactttggtggtattttgtgcttaatctgactttgaataagtggaccaagatgtgttcattgattgtccgtagtttagccctttgctagatgttatggtgaatttacaaaacagtagtaataatattagaataagtaagtaaaataacatgtaagtaaaataaaaattagaataattaaataaaatagttgatacaaaggatggttgatcacttgtgtagttcaagtctttmataggaaatgagattagattgatgtagaacaatttcattgaggagaggaggtaaragtggaactatgaacagaaggatttagataaacagcaatcttggtgaggcaaaaattaaaagtgttgagacttggaattgtttttttatatttggggatcagtgttgagtaaaagtagaagagataagcctggaaaaatagaataaggtcaaattgtggctgtatatacgagttaayggtttctcaaccttggcrctattggcattttgtgttggataattttttgttgtggaggcttgtcctgtacccagtaggatgtttagcaacaacaaccttttcctctactagatgccagtagcatctttcctacctgccccagcctcacctccacctccacttccactgttgtggcaactattgtttccagacattgccagttgtcctctgggggaaaaaaatgttcccgtttgagtaccactggctcatacaaaccaagatgacatagctggaactagaatcggaagtggaggatgagttgtgttgactsattggctgtcttcaagacatatacggttttggtcaaacatagccctgggatagctgtaaataactagtagaatagtgattgatctgttatctattgtgtatatttatagtactaacactgttgtaccagatcaatgaacagaattagattgatgaaattgatgaacaaatttatattgcatatattgtatattagcataaaactaaattaaatcatattgattttgttatggggagaacattggatataatggtattgatggttgatattaattaaattaatttttattttattatttgatattgtaaagggattcttgaaggttggtgttttaaattctaattttaaaatttattttatttttttgtctggccattaccactcagaggagtttttaaaaattctgtaatggtaaaaaatttcttaactgtctgttagttgaaatagctgttgcttggagagattctgatatattgtatgtttgagaaaggttatcttttatttaaccaaatgggaagtaggatttcaattttaaagatatatttttttcaaacgtaagaaaggtttattgtagacttgaaattaactctttctgcctaagataatttctccagtatatttctttttttcctttcctttctctctcttttttttttttttttggaacatagcacagagtcattctttgatgactaggaaattttgtctttgcagcctatggaaaaaatagccaagggccttgatttttctcattgtcattattacccagctatggttgtaaataaatatggtttatctccattcctccagtgcatatgtacaaaaaagaaatagtgactaattagatgaagaagttatttttcagatatcagagaaagataagatttgatgtattgctgatccctatagaaagataaaatttgatatattgctgatccctgtagttggagtctgactaatgtactatatttggagaatgaggggttgggtaagctattaggagttggttttgtggaaaaatgtccattcttctaataatagttaacaaacataaaacattaaaaattttttaaaaaattgctttctattcaggcatggttataaatcaaaaacagaatcaaggagtctcaatttacctctcatttgaaaaaataattaattaattggcattggcaactaccaaaacaaaatcacaaaaatctctgacattttgtaaaatttaccaagtaatagcaaagttggattggtctcaattttgatcagctacccacacttctgccccagttaatcttacttttgcgtctatcgtgaagttttgattgataaaaagccttctagaaggttgatccagaagaaaagtaccttttctttcatcttcatctcctagctctcttaattatggcattgcttcccttctagagcctaaggtgtttcagttttctttagtcagtgtgcataaaaaatctttctgtgtcttagaagtgttgagtcaactctggttattatttattaaatcataattttaaaatgtcaagagattactattattgttatttttaccagatgtgatttttcttggtaggttgggtttaattgctgtgagtggtttacaaaatcataattttcttaatgctttagagactgaaaagaagtcacttgtttgtgagtaatattgggtccacactcttgaaatccaagaagcttaaaaatccaagtgttttgtaaggttcacacaaacttacttgatggcaaagcctaacggaactggtaggagtttatttgtagtatttatttctcatactctgtaaataggatttatacttttctccgcagaaataatgtttgattataggataataccatggacttcactgggggtattagtgtaatatatggtgcatgttccatgttacccttgaaaatctgagaaattatgaattctgaaacacatctggttcttaaagtttcagatagggaattgctgacccgtatgatattgctcttgtatcctatgcaaggttgtttaggataagagtgtttttttcagaacagtcccaagtaagctatggatacctacatgacagttgtgagattgataatgatttcatagggtcagtcagtatctgttaaatgttagtgtttattttttatgcaattttgcttgcaggatgtttttgttagcagtcatttgtatgtgacttgtggggttcactagataccagatactaattacagacagcttccttcaattttagtgcttagttaattacagaggttaagcctagttgagttaatagaaattaaaatgatgtggaaacactttactttttccaccattttatcattacctttttcttggctataggtgcaaaaaaattcatcatcctgtggattttactggctaagacttaactggtttcttccccatctcctactgctccctgtcctctttccctcctcccatttatttctcgcttcaaagattttagattgttatttacttaattgggtacaaaaagaatgattactgagtacttactgagtaatgattactgagttactaagtagtgttgggttgagagggactgggctgccctaggcaggagtggaagaaacctgctagaaagcttacagtcctgtgagctctttaatgtcttcagcctaactttttagtaacctctgtgactgctcattttcaggatggactgctttattcatcaatttcttccattctagagcatatagtagttactgcgtagaagttttgaaagtgtagtgactcttcttttattgatacgaacagtatcctaataaacaggaagattgataatttctcttgcaacttcctttttctgtgccattgctgttgtctcttttcacctgtgttcttggtattcctaaaatttgtttggtatattagagttgtagtataagttgactatcataaatatctatgcttattttactgggtaaagagtaaaataaatgaagcagttttatgggttagatttatcttgttttggttttgactcaatacttacaagtccatatagtttataaaagatgtttaagggaggaagaattttgtctgtattatcagtaaaattaaaatcaagtgcccaatcttaaaagaagcacatttactttaaaaaataattgccttttcagtaccaaatattgccatatgacacaaattagtgcttctctttttaaagcatattttaatttagggttatctatattcatcttcattagcactatactgaactaaaaccattgtatcaacttcattgatttattatttgatcaggttgggaatgtctaccattctttgacttaaatttgtttatattgttttgcaagttattcacaaattttggtggtttcatttgtgtcagcgttgtgtgtgtgtgtgtgtatgtatatacatatgtgtggttttttttttctcatattttcaacagattctgaagggagtggtaatggaagtgaagatgcttcaaaggacagtggagaaggttcctgtagtgattctgaagaaaatattttagaagaagaactgaatgaagatattaaagtaaaagaagaacaacttaaaaattctgcagaggaagaagtactatcatcagaaaaacaattaattaaaatggaaaagaaggaagaagaagaaaatggagaaagacctagaaagaaaarggagaaagagaaggaaaaagaaaaggaaaaggagaaagagaaggaaagagagaaggaaaaagaaaaagcaacagtatctgagaatgtggctgcttctgctgctgccaccacaccagccacaagtcctcctgctgttaacacatccccttctgttcccactacgacaaccgctacagaggaacaagtcagcgagccaaaaaaatggaaccttcgacgaaaccgaccacttctggattttgtgtccatggaagagctgaatgacatggatgactatgacagtgaggatgacaatgattggcgacctactgtagtaaagagaaaagggagatctgcgtctcagaaagagggaagtgatggagacaatgaggatgatgaagatgagggaagcgggagtgatgaagacgagaatgatgaaggcaatgatgaagatcatagtagccctgccagtgaagggggttgcaagaagaagaagagtaaagttcttagcagaaacagtgctgatgatgaggaactgaccaatgatagcctgaccctatctcaaagcaagagtaatgaggtagatcaacccaatttttatatctgtctgtctggggaaaagggaattcttctctaaatcactctacacattgtattaagtggcttccttgaaatcctatttatagacggctgtgggatgaatgagcaccctaactgtaacattttttcatttggccaacagacttttattaaatatctactatttgtcaccgttctcaaggagctcacaatctctgtcctcaaggagaaatatttagagaaatatttttatatccatagacttgggaaatgacaaagttttccattctcctttttatccctttactcctttgttcacaggactgctgaatggtgctgagtgcattatgaaaacaaaggtcacctttctttcaacttagttgtgtccatatccatattaaaatataggcctttagaataccttagagcagggcaacagtctaatgattttctgaaacctttagagattcgttttaaatattaattcctttaccagttgtagcactcatcatctttttagtcaccaaatctttgctttatgtgtatgggacatacacataagtatgaactatttttacatatatttagtaaataaattctctctacaaagaaatggaataaaaacccaaacatttccatcataaaacagacatttttgtcacaaaactgcagtaatggctcagtgcttctacttgaagttctactactgaaagttaggtttattcattgatctcagagatgcatcattcaagactcttcagtcaaacacatttgtgtctctttgtctgtgtgtttttgtatatgtttttcttcaaaagaaagattgagttgttgtcttacatgtagatgtatctgttacatcacatgtagaactgtaataattctgtgatttctgttaatgtgtttatattcaccaaaatttatttctttaccaaacacttatttttttccatatcactgaagtaagttaaacgggtagaaagatttttcctcttatgctttatttgttctttcacatttttctgcctacaagttttacatagcagtgattatctattttaattgctttgcttaaaaatttggtgatttcgttaccaaaataatctatagcaggctgtgaggttatcagtggagatgagacagcagtttatatttggattataaacattggttaacttctgaaaccaatattttatatgaaaaaatattgcctgccttcaatgtcattctaattcttacctttaaaggaaagttgtcatttgggaaatagtgtaatatttttaatgatatagcacaggcagttccatattatcaatgctatcttaaacaggcatggaaaaatctaattgtttgtatttaattgaggcatgcatgcagtttacgttatagcagttaatactctatatataatgaataagtttacttttgaccacatcactttcttcatttttattaggttgatattcttagaagtagtctagctaatgatagaggcagtgtcgattagatttatgctaaaatgtgggggacacctgcatgtgtttaggaatttgccacgtaaagtgtgtgtagtatctgtttattaaacctgtacttcataaatactgcctaagaggttgtagactaacatttatgatgcatttaaagtccatgtgttggttgtttagttttttttccccactagaagacactttagtaaataaagggaccttttatgtttaggttaatagtcccaaacacaaacacattccaggaatgagattccaaagtgcttcttcgaaaagtgcccatgtagaagagattataaaaaggtactttttctccagaataattctccttaaaagcttgagtcattttcccctcaattctattattcaagctctacagtagttttttgatgattttagtttatttaaattatgtccctcaaattagataattacattttaattaaaaaactaatcaattgtgattattagttatatttctagttttcttatttgtatgatcttaattttgtgaaaagatgattaaagctagtccttgttgcctgtggccaatgtttgggtcttaatcttcctggttattttagctagtgataatttctgtgtccaatacatagttaagtatatatttgattatatttgaagtttgattttccctgcttttactttgttttcagaaactactttgtagtagagttaggtgaaaatgtagctttagaaatacataatagaaatatataattataccatatttagtttataagcaggcagacatttttcttagctgctaagttcatttgtagcaaaataatgacctgaaactttcataattttgaagtttcttaagggaacttgatatttattttagcagggcccttttataattactgctcttaatggccttaacatatgcttaatggccttaacaacatgctgcagaccctgaaatactctctagcagtgattctcaaactgtttttttttttttttttttttttttttttttggagacagggtctcactctgttgcctaggctggagtacagtggcatgatctcggctcactgcaacctccgcctcatgggttcaagcaattcttctgcctcagtctcccaagtagctgggactacaggtgcatgccaccatgcccagcacatttttgtatttttagtagaggtggggtttcaccatgttggccaggctgttctccaactcctgacctcaagtgatccacctgccttggcctcccaaagtgctgggattacaggcatgagccaccacacctggtctcattttaaaattttttaaatgtttattttttttgagacagattctcgctttgtttcctggactggggtgcagtggtgtgatcatggctaactgcagctttgatctcccaggctcaggcaattctcccacctcagcctttggagtagctgagactacaggtgtacgacaacgactggctaatgcttttatttttgattttttttttttttttgtagagatggtatatcactatgttgcccaggttggtgtcaaattcttgaccacaagcagtcctcctgcttctgccttccaaagtgttgggattacaggtgtgagccaccacacatagcccctttacagttttaaaaattattgaggacaaccattaatatttgtgtagattatatctgttgatatttaccacttcaaattaaaactgaggaagcacacaagttatcagatcccatttcatgtagtgtctggaaaacttcatggtactcccatgagagaaagagtgaaaaagagaaataatgtcttagtatcattatgaaaactgcctttaccttttatacctactgaaagagagttcactggaccacaccttgagaactgctgctctagaactgggcattagataaactgcattttccgcaaacggacacctgtttttgtcaataaccttatggcattttttaaatttagtgcagcctgaagaatccccttgaaatgtggttgtatgtctttttcagccgttaatcttgcagctttgagattccttaagattatcttgccctttagttttctgaggtaagttttttggggacggcagtgtactattttcagaaatggttcccattttcaagattttgaaactaaagttttgcatgagaattaatccatgaccgtaaattatatcaatagaattggcatttttgttttgtaaaagaaagaagagctctgttctcacagaaaatatttaaaattagagacagtttggattttggattactgctttataaatgtaactttatgttctttgctgagtagaattttttttccataaaagtctccgttaagtacattagatgtcatgttgagaaatggcaattgtcacctgatttttgtgaattaaaatgtaaatgttttgccaaaatttataaatatccacttctatttgggacttctaacttattaatcagttgtctttttacacattgcaaaatgaaacaaattgctctgagtcctaaaaaaaggtyagttctgtaacatttataaatatcgagattcatgagaatttaaccttttctaaaaatgtagaggaagtatgattggtcaagctttttgttataataattttttcttatcttcagggcagtaggattcttttaattctaattttacaggaaatgygctggaatttccttgtattaaacacatgtgatttagataaaatttagcctattgtatatatcatttacagtcatatgtggaatatatatatataaatgaacagtaagtatattttagagcctgtggagaacattgatcagtattatcattttgggggtaagttttaaatcctgatggaaagaatgcaataatttactataagtagtgattgatttattcatatactgtcatttattcttcctataattacattggattccattaaattattccatcataataaagttattttctaggtggtacttttttgccattcaaaacctattttcctgatgtctatttttatgtaaaaccatattttagaaattttatgttaaaagcttcagcttaactactttctctgaaaccttgaaagatgatatacgtcttcagaaatatactaacaacagttgataataaatcaggttttgtattgatctaatcataagtgtgcttaaacttgtgtttgatctgttaaaacagatctagctgggcgtggtggtacatacctgtaatcccagctactcgggaggctgaggcaggagaatcgcttgaacccgggaggtggaggttgcggtgagccgagatcccaccattgcactccagcctgggcaacaagagcgaaactccttctcaaaaaaaaaaaaaaaagaaaaagaaaaaaaagaaaactgagatcctaattttttttaaggaggatgtgttacttagattttccagttgaaacattgtctgctagccatttrgttagggaaatattttatctctagttttccctatttccctctttgcgttacatttctattaagagcctcaagtcatgaggatcagagggccagaaacattagttaatgttgttttctctgcctctaaatgataatagatgtggagagaaattggcgtagagatatgatttaggcatttatggtttttctgagcaaaatggaaaaataggaaaatagaggaattagaactgcattttgatacaactttttctgacctttagaaatttacttgtttcccatatgggtaaaccttttttccagggctgaataattttaattccaccagagaaattaccacacagtccataaagacatgtagcatcctaattttcaaactgtgattgtttgctaaattagtttctagtctgttttttttttttttttttttaacctagatgtggtattccaaggaaagtcttttttggacttaccgtggggatgatatttaaagtagtagtgctcattggagcttgcaacttttcttttgggggtacaaggaagatcctcagtgtaataaattatcagttcatkttcctctttttgaaccaccttaacaagagatacagcggaaaggaaaaggcattgaccatttattgagtgtctagtttgtgccaggaacattcttgccatatattgttaattcttataacctcctgaagtagatattatttttatcgccattttgcagataaagaaattacagcttcgaggttcagtagggaataagcgagaggtgagaaagaaacttaggaatgtttgatttcaagtcaactttgaagcatggctagtagtatgaaaatctgggcagatttttgtttgcttactctggtactgtaaaaccagatgagttttctttaggatgttttcagttttatttgccrgccatttgtcagccccagacctattttatttggttttataacacagagaagcaaaatacagaacttagaaatactagaattctaaagagaaatgatactatattcttgttgatgtttgcattcttttctgattgttttacaaatctgccgcaattttagatgttatacacaaagtatattggaagaattattaattgtgaccttcaagtgtattcaagtgtcagttacaaattgctgttgaaatgatggctccaaatgttacttttggatattggttgagtttaaaagaatataaaaatataaaaaataataaaacatatttatgaaaaatatatattgtgtattgtatgaaactaatttattaaatttatttctgaatattgttaggttcataaataaaaatgtatggacccaagtgccatcttttattatatgtaatgttaagcacaatctattaaatatgcaagaatcattttcttaacttacttaaagtttaaatctataatgcagaaggtttaaatgcaaacaagcagaccctcttctgaaattttatcttttaaatattagtttattaatacgtcttcctatactttttctttttgagacagggtcttgtgctgtcccccaggctgaagtgcagtggcgagataatagcttgctgcagcattgaattcctgggctcaagtgatcttcccgccttagccacctgagtacctgggactaagggcatgcatcaccacgcccagctaattttaaaatattttgtagagacaggatctcactgtgttgcccaggctggtctcaaactcctggcctcaagtgatcctcctgcttcaacctcccactgtatttgggattaccggtgtgagccactgtgcccatcctctctttttatagtatcactagctagatgtatttattaccagtttacactggatatttcttgatagmgacctamttaatagagttctctgacccttctagcagctagtcaatctggatccttttttagattattttctgtatctctgtgtattcatatacctacgcaggctctcatggatctgtcttacrgtagtttgataatgctggaatttctgaatttcccggtacttaaggagtatagagtccttaagtgtgccatcacatacatacttgcttatatgttattttgaattgattttttcctattttgtatatgtgcgtcttgtcttctctaggtaggattataagctcctaaagtgtaagaatcatgtcttgtgcttttaaaacacatgtataggatcaatgattactttgattacttgtggattcatttttcgtttttcctagtttaaggggcaaagcagaatagcaaagcagatcaacagtagttagttgcatgcgtgctttttcatatcctagaggagagagaatacgaagcttgcagagaagtgaaaaattaaataagagggtgcttacagggttctttgataaagaggtcaagtatatatttctcaaatataatgtactttgaagttaataaaagaatggaaaatggggcatacatttggaaatgcatataataatgtttaagtaataaagaattttagtgattaagttttttttttactttaaatgtgattttctgatatatgttaatattttaatattaggactcgctgattcttgagaagagtcaaaactggagctctcaaaaaatggaccatattctgatttgctgtgtttgtctgggagataatagtgaggacgctgatgaaataattcagtgtgacaattgtggcattacagtccatgaaggtaatgttgctttcttttctctctttttagaaatggctgactgtggctcttttacatttgtactaaggtggttctacaatatttcatggtgtttcggttgaaataatgctaaatcatcaaagtatggatgctatttttcaggttatcttttcttttattttgagatggagtctcactgtgtcgcccaggctggagtgcagtggcacaatctcggttcactgcaacctccacctcccaggttcaagcgattctgctgcctcagcctcctgggtagctgggactacaggcgcccaccaccacacctaatttttgtgttcttttttattttatttttatttatttattatttttgagatgatgtctcgcactgttgcccaggctggagtgcagtggtgctatcttagctcacttcatcctccgcctcctgggttcaaactattctgcctcagcctcttaagtagctgggattacaggcacgagccaccatgcctggctaatttttgtatttttagtagagatggagtttcaccatattggtcaggctggtcttgaactcctgacctcgtgatccacccgccttggccacccaaggtgttggattacaggcgtgaactaccgcgcccggccaatttttgtgttcttagtagagatggggtttcaccatattggccaggctggtctcaaactcctgactttaagtgatccgcctgcctcagcctcccaaagtgctgggattacaggcgtaagccaccgcacctggtcccccagtcatcttaattaaaaaaaaaattttaaataatgaaaatagaaatgctatatgaaaatcagtgtttctttaaaggtcrgtgttctggtattgtattttatggtactrtttcttgtttgtttttttttaattttttaattttttaattttttttttttttttttggtagagrcagggttttgctatgttgcccaggctgatcttgaactcctggcctcaagcaatctgcctgcctcggcctctcaaagtgctgagattacaggcatgaaccagtgtgccaggccttatttccagttttttttttttaattttaaatttttaaaaattatttctagtttttaaataaaattcagaagtaggaaaaagttgactattttagtctgatagaaaacattcttaaaaaatttatattctatcaattttttgtagcttcttctttcatagttgtatttttatttttgagacagagtcttgctcttgtccaggctggagtgcagcgacacaatctcaggtcactgcaacctctgcctcccaggttcaagcgattctcctgcctcagcctcccgagtagctgggattacaggtgcctgccaccatgcctggctaatttttgtatttttagtagagatggggtttcaccatgttggccaggctggtctcgatttcctggcctcaagtgatccacccgactcagcttcccaaagtgctgggattacaggcatgagccaccgtgcctggctgacagtatgtatttgttaagagcaaagggccgggtgcagtggctcacgcctgtaatcccagcactttgggaggccgaggcgggcggatcacctgaggtcaggagtttgagaccagcctggccaacatggcgaaaccccatctctactaaaaatacaaaaattagccgggcgtggtggcttatacctgtaatcccagttactcgagaggctgaggcaggagaatcactggaacccaggaggtggaggttgcagtgagccgagatggtgccactgtactccagcctgggcgacagaggaagactgtctcaaaatttaaacaaacaaacaaaaaaaggcattctcttacataaccacataattatcaaagtcaggaagttagcattgatgaaatgctgttttatctaatttatatagattgtattcagatgttgccaattgtcccaacaatgtcatttctaacaaaatcaaagccaggatcatgtattgcatttaatcgtcatgtctgtttagtcacctttaatgtagaacagtccttgagtttctgtctcatagacatttttaaatatatagtccagttttttttattttggtttgtttttacagaatgttcctaatatgattagatttgggttatatgcttttggccggaataccacggaagttatatagtgttcttagtgcatcgtattaggaagcatatgatatttatttgtgcagttactggtgatattactattactttttttctcatttttattgcataagcctaccaatttagaatactggtgatattttgatcacttggttgagagggtgtctttctggtttatctgtggtaaagttattttttcttaccaattaattattattattattattattttttaatcagggctgtgactaccacaaaacagtatttctatggcctttctcttacctgcttttctggtattacagcccttgtcccaagtaattctgggagtctgctggacttgtgggactttgcatgatctgtgattctctagctaatgctctgatcttcatgtggagctgccctttttttgctgctaacactcactgtgggaatatctccagttactgttattcatttatatttttagtaatgtttgttgagtaccttctatgtgcttggtattctgtaaattttaggcatatgaaatagaatgtacacattgttgacctggtggaacttaatgtctggacagacaggcagtaaacaaaccaataaatatctcttagttggtggcccagattctgaagaaaaatgaagtaggacaaggagtataggaatgctgtgtgtgagggtggttgggtgagttgcagaagtttgtatttgtaaaaattgataaggggctgggtacggtggctcatgcctgtaaatcccagcactttgggaggccaaggcaagcggatcacctgaggtcaggagtttgatatcagcctggccaaaatggtgaaacgacgtctctgctaaaagtacaaaaattaatccggcatggtggcacgtgcctgtaatcccagctactctggaggctaaggcaggagatttgctggaacctaggaggtggaggctgcagtgagccaagattgcgccagtgcactttggcctgggtgacagagggtgactctgtctcaaaaaaaaaaaaaaaaaagttgttaagggaaatccactctgataagaggatatttgagcagtgacctgaaggaagtaaaggagcaagtcacttaaatatattgggaacgagcactgcaagtggagggagtagtgaatgtaaagatctcagccaagcacaatggcccacgcctgtaatcccagcactttgggaggccgaggcagtgaatcacttgaggtcagaagttcaaggccagcctgtccaacatggtgaaaccccatctctactaaaaatacaaaaaattagctgggcatggtggcatgtgcctgtagtcctagttactcaggagtctgaggcaggagaatggcttgaacccaggaggcagaggttgcagtgagctgaggtcgagccactgcactccagtctgggcaacagagtgagactccgtctcaaaaaaaaagatcttgaagtggtagcatgcttaagagtgtttgtataatggcacagaagtttgtatggctagaactgggtgagcaagctggttagtggtgggagtagagatgggagtaatccagctggggtcttgcagattccggtactgattttagattttattattgtgtccggaattggtgggttcttggtttcactaacttcaagaatgaagctgtggatcctcgcggtgagtgttaacagtttttaaaggcggcgtgtccggagtttgctccttctgatgttcggatgtgttcggagtttcttctttctggtgggttcgtggtctcgctggctcaggagtgaagctgcagaccttcgcggtgagtgttacagctcataaaggcagcgcgtacccgaagagtgagcagcagcaagatttattgcaaagagcgaaagaacaaagcttccacagtgtggaaggggacccgagcgggttgccattgctggctggggcagcttgctcttatccccttctctggccccacccacatcctgctgataggtccattttacagagagctgattggtctgttttgacagggtgctgattggtgtgtttacaatccctgagatagacacaaaagttctccaagtccgcacagagcactgattggtgcatttacaaaccttgagctagacacagggtgcagattggtgtgttacaaaccttgagctagacacagagtgctgattggtgtatttacaatcccttagctagacataaaggttctccaagtccccaccagattagctagatacagagtgctgattggtatatttacaatcccttagctagacataaaggttctccaagtccccaccagattagctagatacagagtgctgattggtgcatttacaagccttgcgctagacacagagtgctgattggtgtatttacaaaccttgagctagacacagagtgctgattggtgtatttacaatcccttagctagacataaaggttctccaagtccccactagactcgggagcctagctggcttcacccagtggatcccgcaccagggccacatgtggagctgcccgccagtcccatgccgtgtgcccgcattcctcagcccttgggtggtcgatgggaccgcgccacagagcgggggcagcactcataagggaggctcaggccacgcaggagcccatggcggggtgggtaaggctcaggcatggtgggctgcaggttccgagccctgccccgcagggaggcagctgaggcccggcgagaatttgagagcagcgccggcgggccagcactgctgggggacccggtgcaccctccacagctgctggcccaggtgctaagcccctcactgcccggggctggcagtgcccgccaagcccatgcccacccggaactcgcgctggcccgcaagcgccttgcacagccccggttcccacccgtgcctctccctccacacctccccgcaagctgagggagctggctccaccctcggccagcccagagaggggctcccacagtgcagctgcaggctgaaggctcctcaagtgcggccagagtgggcgccaaggccgaggaggtgccaagagtgagcgagggctgtgagggctgccagcacgctgtcacctatcattatgatggatgtgggaagccataacatggcttttcagcagaggattaatatggtttgattcatgttttggaaggatcactcagactgctgggttgggagtagactgaagtgaatctaaggtgggaaactaggaaaatatttaggagaccattgcaattatctaagagaggaattggttttgaggtagatagtaaaagtttggttttaaactctgtttatgtaagatgttaggactagaaatttaaatttgggacttatcagcctgaagatgttatgcaaagatgtaagactaaatgcttgtaacaaagtcatcctagtactttagaggagatggggaacacatggccagtgagatatgaggaccatgggtgatgacccagagaaaactgtttcaaaaagagagtcagtaaatgtgtcaaataatgtttttaagagtgggaaatcaccctaattcaatgctggacttcaagtacaccaccaggcaagctatcccagaggttattgaaaaaaaaaactaattgataaaatgtttatatcacatgattcattaaataaatataaaatacacagaagcaaggggaaagatagaggataagttaactcatttaggctggggtttaagtaggatagaaggaccacactacctaaataaatcctggggtacatagtgttgatatgttttggcttatcaaccttctttgctaatgctgcggttgtgagaaccagagcccacaagataggtgcccagggccaaagataggcacactctcaggaacatacaggagcaagtatgcctggtcatggcgttagctctccagttaatctactcaacagccgtaggttttatttttatttgttagtggacagagtaggtatcaccaatgggtggccaaattaaggcctcaggaatattgagttctaagtgtcgcatatatgtttaatgtattctgactctttggtgccttttgcatatttgcctcaagaatattagatacatcttggtccttctatccctttctgtctgtatttaatgcatacgtgctttacttactttttatctatacatacacatataagttttattgatctcattttgtttctctatagtagagtttaatatcctcaagcagagcaaaaagacattattactgagaatatatcactgaatttagtaacatgagggtcattggccatcttgacctgagagagttcaaagtgagaataaaagaagggaaagtgcaaaaagtgaccaaatgcaattcctgtgatgagtttttatatagagaagccaggagatgggacaagggatgtgaaattgagggagggtttttttctttcttattttagatgctgtattgattatctgctgcagtggaacaaattatcccaaaacatagcagcttaaaacaacaaacatttattatttcacatgatttctaaggggtaagaagctgggagcagttggttgggttgttctggcttagagtctctcatgaagttgcaggtcaaagccatagcctgggctgtagtcattttaagatttggctggacctggaggatttgcttctaagctaagtcaaatagttgttggtaggcttcagttctttgatggctgttggccagagacctcagtttcctactgcatggacctccctcataagctgcatgaatgtcttcatgaagggcagctggcttcagagtaagtgatcaaagagagaaagagacggaagcagttgtatcagagtgctagtatattttataatctaatattggtagtgcatacaaccatttctgccatattccgctgttcacacaagccaaccctagtcagatgtaggtgggggcattctaagagtgtaaataccaggaggcactgattattaagggctatcttagaggctgcctaccacatgtgcagagattatatagcatgttgtgtgctcatggaagtgacccagtggaaagggagaattggtgatataaggaaaatagtgaggaaagaagggggaacaattgctggaacaaaggttttgagtgcaagattagaggggatgagatccagtaccaagtagagagattgagtagataagagtaaccatagtaattagggaaaaaaggatatatgggtccagatgtagctaggttgttagatgtggtagttggagcatgtgtaagttatttttaaaatgtttcttgttttctcagtgaaataggaagcaaagccattagcagagagtgggacagtggggagttagagatttggggaggcagagttgtataaatttatttgggagaataaactgaataaggaaacatatacctaaaatatatatgtatacacacacagacacatatatgtatatatacacacacatacacagcaataagaccacttgatattagtggtaatgaatataaagagctcattaatataaatatattcatatgaatatgatattagtggtaatgaatactgttactgagaaaagtaaacatggttgaatatatgtgtatttttcttctccaggtgtggttcagattcctgggagtaggtaaagaatatgttaactcaggagtagcagctactttggcagtgtttgttacattgatcactgatgatcacaaacatgttactgctgcttatatccatgaatgtcattgctgatgtgtgatacagtcatgatgagttctgtcagttttggtgattctcttatgatgctgagggcactatctctatttttctctgcttcattataatgctgagtaccatctctacttcttaagtcattcttaggtctacttcttagattgtggtcattgactatggatgtatttttttaggccagcacagtagttttgagtaattgaattggttgctaacatttagacattgggaaatcgtacacatttaggatttcaagcttcttttgcaaagttctggcggcactagggttttttgctgttgttgttgttgttaagtgatggagtgccccaggcttgcctcaaactcctgggctcaaacaatcttcttgtttcagcttcctgagtagctgtgactaaaggcattaaaggcatatgcctgcccttgcagtagttttcactttcttctagcacaatctgctggagctgaataaggctgccccctgatagtaaggcctgtggtctccagttcactccagtcctctctcaaaccacttactcatttttgttagttgcctagtccctggagatatttgaatatatagttccttatctgctttgagggtactgtctcttgttgctgatatttgggctgctgatgccttgtggtctcaatgtctcacatctataatagtaaagcaactcttttactatagcttttactttaggacacaagcttgagtccactggggactagttccatgtacatttcaaaatgaccctcgctctctattttgttgtttttgagtcatgttttgctccttggactcttaacttaggatgagttctttcccagtagattcattgttcagataaacatagatttctgtaagggcacaacattagttccactgacatgcttacagctattgaaagttcataatacgacccctgcttcagatgaatagcctcggtactggaaaatctaccttctttccaaagtagctttgattttcagaaacatttaaaaagtctgaatcaaggcagacaaatgagatgatcaagctgagtggtaatgccaattaagtcaacaggatgttgtgtctatataaagtcatgtaacaactcttcttgtgtaattgatttaactgactttgatggcagtccaagttataaatatttttgagactttgctaatgataactcatttaattcctaaaactaattcattagaattggagacctatttttgttacagagaaggaagaaagtagagaaggagagggaaattgatgcataaatagggaagctgaatagtctttgaccactttaggtgaatctttattttgtataattaatttattggtagtaatttgaattctgtgaactttatatatgttccaagtaaagatgcaaaagatgcaaaaaggtcaaaaatacgttttgacttaaaaaattacgctactactttcatcctctagtttaaataatttcccatttccctttttaattttggagtttctgttgtatgattgattttgtatgttgtattattagactttctgttgtatgatgtggagtatcttttcatatgcttatttgcctttttttttttttttttttttttgagatggagtcttgctctgttgttctggctggagtgcagtggtgggatcttggctcactgcaacctctgtctcccaggttcctgcgattctcgtgcctcagcttcctgtgtagctgggattacaggcacacaccactacacctgactaattttttatttttagtagagatggggttttgccatgttggccaggctggtctcaaactccagacctcaagtgatccacctgccttggtctcccaaagtgctgggattacaggcgtgagccaccacacccacccttatttaccttttgtatatcttcttggatgaggtgtctattcagatcttttgcccatttttaaaaattggtttgttttcttattgttaagttttaagagttccttgtatattttggatatcagttctttatcagataggtcttttgcaaatactttctcccagtctgtagtttgtctttttattctcttgaaggtatctctcacagagcagaagttttacattttaatggagtccaacttataaattatttctcttgtttattacgcttttggtcttgtatctaaaaagtcgttactatgcctgaggttatctagattttctcccgtgttattttctagttctataattttttaattataaattttcttaattaaaaatttaaaaatttttataaatttgcatttcacatttgggtctgaatttatttttgttacgagtatacggtctgtctcggaattcattattttgcatgtgtgtgttcaatttttctatcaccatttgttaaaaaagctgtctgtgctcccttatattgcctttgctcctttgtcaaagatcagttgactatatttctttgggtctttttctgggctcagtttgttcatcaactgacctatatatctattctttgattaataccacactgtcttgattactgcagcttcatagtaagtcttgaagttgagtagtgttactcctttgacttgttttttttccttcaatattatgttagctcttctgggttttttgcctctccatgtaaactttagagtcagtttgcagtatctacaaaattacatcctggaattttgattgggattttattgaatctatagatcaagttgggaagaaatgacatcttgacaatattgagcttttttattcatgaacataataaacatttatttatttagttctttgatttctttcatcagagttttgcagttttcttcatagagatcttggcaatattattttattttttggggggtgctaatgtaaatggaattttgtttttaatttcaattctacttgttcattgctttcataagaaagcaattggcttttgtatattaagtttgtatgctgcagtcttgctataattgctttttagttccaggaaatttttggctactcttccagattttctacttagacagtcatgtcatctgaaagcaaagataattttatttctttctttccagtgtgtatatttttgtttccctttcttgtcttattacctgatgttgaaagcagtactgacagagaacatccttgcctcatacctcatctttgtgggcaagcttctagtttctcatcgttaagtatgatgttagctataggttttttttgtagtttctttatgctctagttgaggaaattactccttatttctgtttgtgttttttttttacttgtttgttttgagacagagtctcactctgctgcccaggctggagtgcagtggcgcaatttcggctcactgcaacctctacctcctgagttcaagtgattctcctgcctcagcctcccctaatgtgtataattttaaaaggtgcctcaagattcctcatgcaggagatgggaaggatcatcctttgagagacattggtttagaagaaagtaaaaatggggggataaaaggaactctgcaatgtggacgatgtcatgctggagcttagacagccacaggtgtaggtcaaggggggagccagagcaatgtagaatgaagtatggttcctggtataaggcaaatatcaggttgacagtgaggtttctaaaaattaagactttttattttatttatttatttatttttgagacggagttttgctcttgttgtccaggctggagtgcaatggagcaatctcgactcactgcaacctccacctcctgggttcaagcaattctcctgtctcagcctcccagagtagctgggactacaggcatatgcgccaccacgcccagctaattttttgtatttttattagagacgggatttctccatgttggtcaggctggtcttgaactcccccgcctctggtgatccactcgcctctgcctcccaaagtgctgggattacagacgtgagccaccgcgcccggccaaaaattaagacttcttaatcctcttaataatggttagggcaaacacaggaaagaagaggcaaaaatgaaatgctgatgacaaaaattaacggtgtgagcaccaatagaaggttgagggtcaatgcagatggaagcttgggtagtatctgctaaagagatgtgccacctcttgctccagctcttctactgtcttcagggtgatttttctttcttttttttttgagacggagtctcgctctgtcaccaggctggagtgcagtggcatgatctccgctcactgtcgcctcccagcttcaaggaattctcctgcctcagcctcccaagtagctgggattacaggcgtgtgccaccacacccagctaatttctgtatttttagtagagatggggtttcaccatgttggccaggatggtcttgatctcctgacctcgtggtccgcccgccttggcctcccaaagtgctggtgcatatctgttcatattattttctgcttaaaatcagtcccttaaaataaagttcacgctaatagcaggactctctgagatcccataccctgaccatttgaatgacttgtctttttctccagtgtttgggggctttcatatatgcttttccttttacccagattcctcttgttccacaaatataacctaaatacataggtgttaagccagtgtttaccgtttgtcttcctgttatttggagatttgaaaaatcttacttttaattttatttttaaatattttattgtgtatatttcaggtatacaatatgttgttatgggatacatatagatagtaaaaaggttactgtagtgaaggaaatgaacatatccatcatctcacataattacccaatttttaaaaagtttaccaagtccatccttctgcagaaattacctatttttttgtttttgtgacaagaacagctaaaatttacatttaacatgaatcccatacacagtacaagtttattaccttgaattaattcattaaaatattcttaattataagtgacatatgagtagatatgtaaaaatagttatgctgtctgtctcaactctacttctctttgcatagggaatcactgttaacaatttggtatgtatctaccccatctgttgtaccttgtgtaccaggggttttttaactttattttattatgtagatatatgtcctctgtggaaaacatcagtagaaataagctaagaaaacatctcccagttgggcttggtggctcacgcttgtaatcccagcactctgggaggttgaggtgggtggatcgcttgagctcaggagtttgagaccagcctgggcaatgtggtgaaaccctgtctctacaaaatacagaaaaatcagccaggtgtggtggcttgcgcctgtagtcccaactacttgaggggctgaggcagaggatcgcttgagccagggagttcaaggctgcagtgaaccaagattgcaccactgcattccagtatgggctacagaggaagactttgtctcaaaaaaaaaaaaaaaaaaaaaaagaaaagaaaaagaaaacatctctcataatcataccacctagaggtaaatatgcttaaaactttagtgtttgttcttccaggctttttttttttttttggttgcttgctcatacatatacacaaatatatatttttaatttaatagccaataatatgcacactcttcttataatctgtatacctctattgtcactatggtttctccacaccccacaggatccattcaggtaccatgagttgcacttgtgttatatctctttagtctccattaatctagaacaatttttctgccattttgtggtgttcatgatgttgacatattgaagaatcttagtttttataatgtcatattgaatatctctcagtctggatatatctgattgttttcttgtgattagattcagtttaaatttttttttttttttgtaagagtattgtgctggtgtttagttcccattatatcacatcaaaagacgtataatgtggctgggtgcggtggctcatgcctgtaatcccagcactttgggaggccgaggtgggtggattacttgaagtcaggagttcgagaccagcttggtcaacatggtgaaatcccgtctctactaaaaatacaaaaattagcctgtaatcccagctggttgggaggctgaggcacaagaatagcttgaacctgggaggcggaggttacagtaagccaagattctgtcactgcactccagcctgggcaatagagcgagattccgtctcaaaaaaaaaatgtataatgtcaatttattgcattattggtgatagtttaggtgatgtcaaccacagacctcttaattttaaaggttttttttttctatttgtaattaatgataaatctgtggggtaataactttgagactctgttaatatgccattctctagcaactttccacttaatagttttagcatccttgtcaaagtcactgattacaattacactgattacatatgtaggctgcaagatggaaatttgctaattccaattctaattcctcctacatttattaggaagcatttactgtgtaaagaaattctcttcccctttttttccttttcagtattactgtgagctcatatgttataatctattaactgattgctgtttctgttacttattacattgtccaartttgaccagtgagagtcctttaagaaggcccttgtgtatacacaaacacttctctctctttctctcactstttctctgttttgtccaccacttttctgtctctacctctaaataaactggataaatccctaagatatttttctacaacttgctttgtttcactcatctgttaattctgtaattcttctcatgtcagtgtatgtgggatatttcattctttttaatgatacatagaatggctcaaccataatgtacttatttttttgtttcaagtttttcacttatatatagtgctgacaaacatgtgccatgtatatatatgtaataatttctgtgggatagatacctagaagtaaaaattcttttttttttttttttttttttttgagacggagtctcgttctttcaccaggctacagtgcaaaggtgagatctcggctcactgcaacctctgcctcctgggttcaagcgattctcccgcctcagcctcctgagtagctgggactacaggcatgcgccacctcacccggctatatttttgtattttgagtagagacggggtttcaccatgttggccaggttggtctcgatctccagacctcatgatctgcccacctcggcctcccaaagtgctgggattacagggaagtaaaatttcttagtcaaaagataagtgtatttaaacttctaaaaaccatttccagattgactaccaaaaggactgtactaattaccaacaatgcacaaactacttgataacattgcatatttgtaaattttcttttattcttttggatataatctctttattacaatgtgcattcaccttattaagaatgaagtttggcatcttgtggccatttgccacattttgttttctgttacttgcctgtcattttcttagtcatttcttttctttttttttctggtgaaaacatacacatatatttagaattagccagctggactcagtttagatgatcccaattttgttggcaagattcaaagcattgtaatcaggagccagtcgaacatatgccttcttttctccatcaggccgaattagggtgttgacaccttggccacatcaatgtcacagagctccttcacagcctgtttgatctggtgcttgttggctttaacttcctcagtgaacacaagcatgttgttgtcttctatcttcttcatggcagactcagtggtcagcagaaacttgatgatggtatagtagtcaagcttgtttctcctgggggagctyttccgaggatatctgggctgcctccagagtctcagtgtcttgggctgctggaaggtgggtgacatgcggatcttcttttttggtggctgtggacacctttcaacactgccttcttggccttgaaagccttcggtttggcttcagctttaggagggacaggagcttccttcactttcggcactgtcttgtgaaaagcatagtcatttcttgtcctggcgcggtggctcacacctttaatcccagcatgttgggaggctgaggcatgtggatcacctgaagtcaggagtttgataccagcctggttaatgtggtgaaactcccttctctactaaaaatacaaaaaatttgccaggtgtggtagtgggcacctgtaatcccagctacttgggaggctgaggcaggagaatcgcttgaacccaggagggcttgaacccaggaggcggagattgcagtgagccgagatcgcgccattgcactccagcccgggtaacaagagcgaaactccgtctcacaaaaaaaaaagaaagaaaagaaaagcttagttattaggttctctttttttctcattgacttattggaattctttttttaatggtctttgtctgttatatgtgttgcaaatattttccatccttgcaaatgttttttatgttttccatcctgttctgtatcctttaactttgtgattttttattgtttacaattttctgtacagttaacacctgtagattttttttcccccttaactcttttgggactagtttttaagtttcaaaatgaatttttatctaaaactcaatccaaagaaagggacatttttaaaagtgtaataagtagctagtattgctagagtcttttgtttttaaatatggttgcttacagtgacagacttccatattgtaattcagccatgcaatttttaaaaaacatggttaaatatgaacttcatgaatactttatttagagaaaactatttgcctatcataatacatgaatattaaataaaatgtggaaaatatagaacagagagaagaaaaaaacatttctaattgtcctcatatccagacagccatagtattttgttgcatttcttttatctccttttttttgagaaatatgcttattctcaagtaattgcataaggatctttaagttgagattttgctaaaagatagtatgccaaatttcgcttattgaatttataattgtttactgtaattacttttcagagtgctcacttcatctaaatctcttttctttttgaaatttgagggctgcagtgtgtcacttagtataaatatctttgtgggaagatcttctaatattagggtacctctgaccgtgatgtcacttatcctgatatcctgattgtagtgtgtctgaattcaggagaatgtcaggtatatgttagtacttgacagaagttaggtagtgtacttaccagcagttgccctcaggtttagttgctattcattaaatgagataaggcttactaagagatgtttccccctatttatttttcagtttactgttagcctagcccaaggccatttttgttttttagtgtatgcaaaaagatatccttaggagtgttcactggatagtagaatatgttcaagttacaaccatttggtactttacttcttttgtgctttaggacaggggtccccaaccaggtggtactggtccttggcctgttaggaactgggcctcacagcagggggtgagcggctggtgagggagcattactgcctgaactccacctcctgtcggatcagtggcagcattggattctcctggaagcgcgaacactattgtgaactgcacatatgagggatctaggtttcatacttcttatgagaatgtgatgcctgatgatctgaggtggaacagtttcatccaaaataatccccctgtcccatccatggaaaaattgttttccacgaaaccagcccctggtgccaaaaaggttggggaccaatgctttgggatatatttctgacaagtattatgcatgttgtaggtactgtctttctcgtaaacaatattactcattttaaaatcttttttggccgggcgcggtggctcacgcctgtaatcccagcactttgggaggctgaggtgggtggatcacgaggtcaggagatcgagaccatcctgactaacatggtgaaaccccgtctctactaaaaatacaaaaaaattagccgggcatggtggtgggcgcctgtagtcccagctactcgggaggctgaggcaggagaatggcttgaacctgggaggtggagcttgcagtgagctgagatcatgccactgtactccagcctgggcgacagagtgagactctgtctcaaaaaaaaaaaaaaaaagtcttttttattgatgagtttcatagtcaaaagtctaatgatatattaagtacagaaaaagtgttttaagtttttaaatggcaacttttatatacctgttttatatataccgaaatataattaggatagatattattaaacacatactgcagatgaaataactaagcttcagagatttggtttgttcaaagttacacagctagaagatggaagactgaaagtccactggcccctgtgtgaaaagctgaatggggaacatttccactgatttgaattatccatacctttgtacaactcaaaacaattgtaaacacatatttttattttcttaaatatgagttgtgtacattgcatatattagtcaaagattgatgctaattaaatggccatagaaacatgtcttctgtgttacccattggaaacacactgagcacatatgagttttatgtgtttatacattgtttattttgtttacccatatgaaaaagaaaatatgtttcccatactcatgttttatatggaagagagaaagattttagaacgtatttagtcactaattaaaatgaattggagcagatatacagtgctagaactttggtctagagctcagtaaacccaacaggtatgacagagaaatatgggataagtggcaggtaaaagtggcaagtaaagaactctataaaggtaatgacacagtatggatcatttttcagggacagtgaagctgaagaaaaaatacatacagacttgctggttgttctttgagcttgcacaacaccattcttccagattacaaaggaagaatttcctgggaatggatttcagaatcattcctaagattaaytgtaggaggtttaaaactctgtgcaaatgtgcacgtttgctatgtgtgtggaatattctttaaaaatataattgaaaattttctttattctgaaaaagtgaactgctgtgatttaccttgatttggctgaatgaagttaataaattggatagctccttaagggctttattctcttggtaattgcctacttgtgtggatgcacattttatctagtttgaatttgtttcaaaggaacattattttgtaaataaaatatatattttttcccatgtggtattgcatagcacatggagaaaatagattgatgataccgtttcattttatgatttttctttgaatataatgttttgttcttttattggaaataaaactgaccccaagaataaaattatatttccttttaattttatgatagtgcatttaaagtaatgtatatctacccaaggtgatgaagatgatgattgccaaccacaatttaatgacattaaagaaattaatgagttttgattcctttgcttatcttgtgtgttatagtctaactccttttaaatctgttctttgacattttatatgactttcagattgtgtgcgtatatatgatacatataattatgtattaaagtatgttaattaaaaatgttaattaaatgaaattaattatatagtttaatttgtaactattaatattaactatatttagcataactattaacatagtatatatgaaatccatatatacatatatatatacacacacacatgcataatctgaaaaaatatatatacttttttgagacgagattttgctctgttgcccaggctggttcactggcaccctccacatcccaggctcaagtgattctcccacctcagcctttctagcacctgagactaccgtgtgtgccaccatgcttggctaaactcttttttgtattttttgtagagacagggccttactatgttgcccaggctgatctgaaactcctgggctcaagcgatcatcctgcctcagcctcccaaagcattgggattgcaggcatgaactacacgccttggctgactttcagattttattaaaattcactgttataaaacctttgaatagcataaggataacaattaaacagttgcttgaagcagcttgtgtaagtcatagctgcaaaccaactttttagttttttgcttactattaggctattttagttatgatctatatttggtaagtagtgttttaatgaaatacttacatgtaaccactgacatataatgacgtctagttaattaatgttggtaatttaaaattatttactaattgtatatggctcttttcctttctcgtgggtgatttgtttaactcagtattcattcatttatatactgtagttatttattttagtttgaatttctttgatggttgtgagaggtcacgctccaatttaggctcctggttgtctggttagtgtttaccagttcaaataatcacatgatcttacattggatatatataaacttacccatatggtgaagtcttttaggagacgatcatgttaaatgtttctcactgtggcttatttaatgtcatcagtttattgcgtgttactttggatgccccttagaacttggcaccaagacctaccctcttagaataaacctggtcaaaaggatgttgggatggttgctattttatctttagaaatgacctattttgagatgtaataaatgtgtctcaggagactggagaaatgcccaaacctaaaggtgatacttcaggacaagaattaagttgcaatgtgttcattattatatatgctttagattgtttctttgaaggatgttttacattagggcagtgccttcctttttagaggaagggaaatttgataataagttagtgtatgtccactaccatttgggaaaaagaaatctatttaggagtcatgactatcatcagtagagaagtgtacttcattgttggttatcagtaagtagttcagcatggttttttatagtctgaatgaaatactctctcagaacttttcaatttccatttatcagattccatgtttattatactttggtggtagtaataacaaacttttaggcatcttgatgctgagaaagttatttatgattatggatgtgacattgcttaccagcagattttgttggtttctaagataccggcagcctcatcaatgctgactgagttcacagacaaaattgagttgtaggaattttaatgatcaaaacctgatttaccaagatattgtcaatgaagtcctgcctgaacttcttattgcagctttgataaataatctactcttttaaactcaaaatcagggaaaatactttaaaaattttaggcagatctggaagcctaaatagaaactttaaatatacagtcacccctcagtatacctagggaattggttccaggacccctgcagataccaaaattagcacatattcaagtcccacagtcggacctggggaacttgggttatgaaaagttgatgctttgtttatgtgagttttgtatcccacaagtgtattttcactctgtgttgtgttgaaagaaatctgcatataagtgcacctgaccagttcaaacctgtgttgttccattgtcaactgtaacttgtaattccagagatgtatctaaggcaactttgcttttgataattggagggcaattgaattgaagtatgacatgtcctactctaaagtgtaaagagcattgccaagttatcttgtctgttgggtgtgttcatgagaatctttaaggatttttattacattagctgcctaaataatatgatgaactcctctcagaatgttgagttttgtgagtgataagaggaaaaaagagaatgacatattgttttcatccatttcagttatagacaaattttcacagaaagaataatttaaaatttttgaacagattaaatacatcatagagttagagattggctcagttgtgcatggaactcagtctgtctaatgttactactctgaacttttcaaactgttctatagctttaggtgcataactttgcttttacaattgtattatacctgtttgtattataatctgccacctccaaaattagatcaaagactttttggtttgtatctttgttttgcatgagtttgatcttttatatatatattttagtacctgctacaaagggacctcartaagtgtttgccaaccaataattaatctaaattctttaatgacaacttgtattttttatattttatatttttattttttatgagatggaattttgctcttggcacccaggctggagtgcagtggcgcaatcttggctcactgcaacctttgcctccagggttcaagtgattctcctgcctcggcttctcgagtagctgggattctgggcgcctgccaccacgcctggataatttttgtgtttttaggagagatgaggtttcaccgtgttggccaggctggtctcgaactcctcacctcaggtgatctgcccacctcggcctcccaaagtgctgggaatacaggcatgagccactgcacccagcctaatttttatattttttaaattaaaaatttattgttttcccacctttaatgcttttacagtaggactaaaactatttttaaaatgtcatttatttcattgtgtatactacattaggtgaaaaagtatataaaatgagtttatttctgtattttaatacgtttcttataaaccattggtgtttcatatctttttcctcatctctttgctattctttttcttttgtgattttatgtgactttaacaaaataaaccctatttaatcatagtgtttttgttttttttaggttgttatggagttgatggagagagtgactctattatgagttcagcttctgaaaactccactgaaccttggttttgtgatgcctgtaaatgtggtgtttctcctagctgtgaactgtgtcctaatcaggatggaattttcaaggagacagatgctggaaggttaatgtcctaattatgttggttcatatgtttgctttataatgtgtctgcctttgacttccctgttcttctgtttatgattacacactttcatttgattgcttctttgtatcttcttggcatagaataaatgaccagtgggatacagatggagaagggtgagaggaaagaccatttattgagtacctgcatttgcctttacatccataatcttaattaatcttaataattgaccctatgatgaggcaggtggtaacgtttctcattttataggtgtatagtacccagggctcagattatttaaataacttattcgttcaagaccacaaactggtgaatggtcaattttgaacctagatctgtataactttatatcaggagatagaacttaatacagtgatttaaaaagaagtttagtataaagaatttttaagctgtgataaaagagtcactataaggtataaaaaaactctaaaggatgctctgggcctgagggagattatccaaggaatgacaaaattggaatgatgacctcctaccctaggttggggttcaggctttgttggagaaattatagttaaaccctactggatggagagaaggccctctgtgttgagagggccatggaaaaatgatcttcatgttgggccagggctgtgaggtcactgagggactgtgtatatagctggggcagagcacaggaggaagtactccacccatacctgctgaaaagcccctccgttctacgagacctcctgccattgagtttatagctccctctaccattgagcttagtgttatgctcactctgagaagaaatgctgaagaaattctgtccattattgcagagtaggtattgaagcatgcgtgagaggcaattaataagtggcacaaagacctgtgttctttttactacattcacactcatgtttgttaacacatttgagcacttgtcatcataacggtgttgccatcttccatgttttttttttttttacaggagactaccatctagggttggtgactaaaattaagagtaattttcaaccttttgtatttcgtggagatcacgctctgcctcttcctctccaatataagagggggggtgggtacttaaatttttattttgtcacataaggatgttttagtattttattaaacatgctttatattaaaaacaagattaacagcaaagcaacctatataaattatcaccatcatttcccatattttaacataaaaactagggtatattatgtcctaaaataaaggataggcttttaaatttaataaattttactttagtaaagtaaaacaaattttctcttatttttatcatttttgcctcaattggtggactgatccttgagaaatgttgccatacaagattgctgggatagcgtagaatctaccattgaatcttggagaatcccatgtgttgatgttcaggacaaatgactaaagaatcttacctcttcttccttattgtctatccaaaaataaaatatataacaaatgatttgatgtattgacatgaatctgtggtctgtatcataggcataggcattactctaagttgggcctgagagtggcctagtattagggagtttagtaagcattaagtgtgcaccttcaagttggactgtctatgtttggattctagtcttttttttttaatagctataattttaggcaagtgatgtaacctttttatgcctcagtttccttagcagtgttgagaagactaaatgagatgatccatgagaaacaactagcagtttctgtaacataataagtggtcagtaaatgtctccttactcttactactgccgttactgctgctactagtgctttcttattaccattattgctccacttattttaggtaatcatggagtattagctcatgcatagattttttttttttttttttggtaactcttccagtcctgagaattgaaatttttggtgataaattgtggtgaataagtaaggcagttttggaaagacagaacttccttttagggaagagaatttattttactgtttttcttgttgataatttaaaagttctgttaggacactgtcaagtagtggttacttcatgctatcataatagacaaaacaactggcaaagttgtttctgaatgaagaaaactgaggcctctttaccatttaggtttactgagggatttttttttggatactgtggacgttacataagtagacacctcctgtgatggtgcaatctggcaaaaattcttttatatactatttgaacacttgtgctaatgtctacacttacctgtaggctgtactggaaattataggccttcacaatatttccaaggacgtaatactagtttgattaaaggtataaaaagccaagaaaattcgagaagccttttagtatatgagcttcaaatggaaaacagggaaaaagaaagaatattgtatataaagaataaaaaaggttttgaagttcaccatcacatgagattaattagacttttttccttctattcttgatgggagccacaagttctacatagaaaatgatgtgatttaatgtaagaaaaccagtacattcttgtcattaaatttttattttatatcttatggagagtaagacttataaacctgactgtgggaaattttttggcatgctctccttttttattttttatttatagttttactatttgtgggtacatagtagatatgtatattcatggggtacatgagatgttttgatacaggcatgcaatgtgaaataagcacatcatggagaatggggtatccatttctcaaacacttgtcttttgagttacaaacaatccagttaccctctttaagttatttttaagtgtacaatttagtttttcttgactgtagtcaccctgttgtgctattaaacagtaggtcttagtctttccactttttcgactcattaaccatctcccacctccccccaccatttcaccctttccctgcactatccttcccaacgtctagtaaccatccttctcctgtctgtgtccatgagttcagttgtttggtttttagatcccacaaataagtgagaacatgtgatgtttgtcttgctgtgcctggcttatttcacctaacataatgatctctagttccacccaagttgttgcaaatgactggctctcattcttttttatggcttagtactccattgtgtattgtgtaccacaatttctttatcggattcgtctgttggtggaaacttaggttgcttccaaatcttagctattgtaaacagtgctgcgacaaatataggagtgcagatatctctttaatgtactgatttcctttctttcggatgtatacccaacagtgcagttgctggattatatggcagctcaatttttaggaacctccaaagttttcttcatcatggttgtactaatwtacatttcatgcaacagtgtacaagggttcccttttctccacattcttgccaacatttgttattgcctgtcttttggatataagctattttaactggggtgagatgatatttcatgatagttttgatttgcatttctctgatgatcaaggattttgagtcccttttcatatgcctgttttagcatatgagcttctttttatatgtctttttttgagaaatgtctattcaaatcttttgtctgtttttaatcagattattagattttttcctgtggagttatttgaactccttgtatattctggttatttatcccttgttagttgggtaatttgcaaatattttctcccattctgtgggttgtctcttcagtttgatgatgtattctttgcccagcttgttgtgatcctgctttttaaaaaaacctgatatgatatctttcgtctgtttttgcttcggttgcttgtgcttgtggagtttcgctcaagaaattttacccagagcaatgtcctggattccccaatgttttcttgtagtattttcatagtttgaggtcttagatttaagtctttaatccattttgatttgatttttgtatatggcaagagatggcgtctagtttccttcttctgcatatggatatgcagtttttccagcaccatttgttgaagaaactgtcttttcccatatatatgttcctggcacctttgttaggcactaagttcacttaggtgcgtggatttgtttctgagttctgtattttgttcctttgttctgtgtatttgttttatgacagtaccatgctgttttggctactgtaggtttgtggtataatttgaagtcaggtagtatgattcttttttgcttaggatagctttggctcttctgggtcttttgtggttccgtatacattttaggattattttttctatttctgtgaagaatgtcattggtattttgatagggattgcattgaatctgtagattgctttgggtagtatgggcattttaacaatattgattcttccagtttgtgaacatggaatatttttccattttttggtgtcgtcttcaatttctttcatcagtgttttatagttgttattatagaaatcttttacttctttaagttaattcctaggtatttaatcttatgtgtggctattgtaaatgccattacttttaaaatttctttttcagattattcactgttgtcacgtagacatgctcctgatttttgtatgttgcttttgtcttttgcaactttactgaatttatcggttctaatagttttcttatgaggtctttaggtttttccaaatacaacattatattacctgctaacaagaataatttgacttctttctttccaatttggatgccctttttatctttctgttgtctgattgccggaagctagggcttccagtactatgttgaataacagtggtgacagtgggcctgcttgtcgtgttccagatcttagaggaaaagcttacagtttttcccattcagtacgatactagctgtgggtctgtcatatatcgcttttattatgttgaggtatgtctttctatcccgtttttggggagtttttatgatgaagggatgttgaattttattaaatgctttttcagcatcagttgaaatgatcatatggtttttatccttcatcctgttgatgtgatatatcatgttgattgacttgcttatgttgaaccatgcttgcaacccagggataaatcctacttggtcataatgatctttctaacgtattgttaaattcggtttgctggtattttgttgaggatctttgcgtcagtgttcatcagagatactggcctgtagttttctttttttgatgtgcctttggctggttttggtatcagagtaacactggcctcatagaatgagtttggaaatattccctcttcctctgttttttggaatagtttgagtaagattggtattagttcttctttaagtgtttggtaaaattcagcagcgaagccatcaggtcaagcagtcccaggcttttctttaccgggagactttattatggcttcaatctcgttacttgttattggtctgtacaggctttggatttcttcatggttcaatcttggtaggttgtatgtgtctaggagttcatccatttcttttagattttctaatttattggcatatagttgctcatagtagctgctaatgatcctttgaatttctgcaatatcagttataatgtctccttttttatttctaattttatttacttgtatcttctctcttttttcctcagcctggctaaaggtttgtcagtgttgtttaccttttcaaaatactaacattttgtttcattgatcttttgtatatgttttttatttcaattttatttatttctgctctgatctttattaatctactaattttgggtttggtttgctcttgctttcctagttctttaagatatgtcattggattgtttatttgaagttttttctcttttgatgtaggtacctatagctataaacctccctcttagtagggcttttgctgtatcccatagattttggtatgttgtgtttccattactattcgtcatactcttcttctttatgtcctttgttgggtgtcctcccagctgttctgaaatgaaatatggctttgaactaaattccttaatttttaaaaataagctttatgttgcaatagaaggcagcattgaaatctttatgtctcagttctttctttttttttttccaatcagacggggcctggctctgttccccaggctaaagtgcagtggcacgatattggctcactgtaacctctgcctcctgggctcaggtgatcctcccactgaagcttcctgagtagtgcaggttataggtgtgcgccaccacaccaggctaatgtttgtatttttctgtagagacgaggtttcaacctgttgcccaggctggtcttgagctcctgggctcaagcagtcctcccacctcagccttccaaactgttaggattactgtacctggccaattttttctttttttctggagagaacgtctggctttgtcaccctgactggagtgcagtggcatgatcttggctcattgtaaacccccgcctcctaggctcaagcagtcctcctacctcagcctcccaagtagctgggactacaggggcatgccacgacacctggctaaattttgtattttttgtagcgatggggtttcaccatgttgcgcaggctggtctcaaactcctgagcttaagtgatcctcctacctctgcctcccaaagtgctgggattacaggcatgagccactgtgcctgaccacttctttctttttttttctttaaaattctagatttagtaagtcttagttctgtcccttgctagacttgttatatttgaaaatcagttaatttttctgaaaccaattcttcatatgtaaatgaacaacctcctactcaacagaagcttttaggcttttttttccttgtagttaacatttcttgagtgaagacagtgagccacactctgctgtaagcacttcacatacatctttataacttccaaactacctttatggtgctctgtgcctagtagacacttataattgattactgaatgaaggaatgaaaataacgtacttgacgtgaatttgttttacatgctgtaaaggcattactgatacagagcacttcaaactccaattttattgattaatatagttttcattcttaaatgagtcttttgagaagtatcactctacttagtctgctttattaaaatatatgaatttacaataatctgttaatagtttgtgctaggatgacaattctgactgttttttggtggttttatgtgatgcttatttcctgttcctttccccagtcagcatctgtcataatagctccaagcaaaattaatggtaaagtaacaaggaagatttttttttaaattgtagatttgtcttaattacaaagttataaataatgtgcatctaaacagatgagcaagaaactatttacagctggtattaaaagggaccatagttgtctcggccatgattttcattgactttgataggtattttaatgaggactcaagttggtatcctcacatgagtggttgggagaatgatatacttgtatgccagtcacattgaaatggcagtttaaatctgtagtacttgtgtactacattttaagaaggtcagtatgaagcaagcagccagctgttaggtttatcaragataaactcctacagagtatagcgacatttaatacatcagtggagcatgaaaaaactgaacaaattaaattgagaaagcagctgcttgttgaagaygtgtatctttatattgaactccataggatgtatttgggaggttggattaaaacattctatcaagaaaatctcaaaaccttggcttttttccccaataaaaaagataattttttaaaaagatttagaactatttttcccagtgcctctagagaataatttttggtcttagtcctctaaaactcataatgcaccacaaaaaccagaaccatgtagcatgcatagcctctgaagttgtgataaagcagaatttgttgttaatatattcacagggttaatagagatttgctgctgtgaccctctttcttacaaaagtgctaagatctactgtttaaatttcaaagtcagtgatgccacattttgttttgttgtaagcaagcagaaagagtgcctaatatattaaaaaaggttcagagcagtttttaaaaaatgaaattagaaacaactgcaatttttttcagtgtactgaaactctgagcattctttgttttagtcttatagcatcattcaaactttaataaatatttatatttggggcatataaattttagtatrtagattgtatggtaaacagataagatgaataaaaatgtgaattgcttattctgtaccttttcccagcagttttaatctggaaaggaagttaaaactgtatacaaaaattgtaaaatatgtccttaaagattattaccccagcagcttttggaaaagagtaataagagaaattttacctaattactgcagagtaaattcacagttattaaattagtatccttaattctcaaagggtttgaaataatgaacgtgactacctttccttgcatatgaaaatgatgttttgtttcatttgaatagtagttttatgcaaatatttaagaatagataagtgcaaagtgcagtgagtgaattttaagtgaaaggcaattatagttgttagctctcagttttggctaagctgctggaaaagtaatttcagtccccttttttgtaactaagtgttattctgtaggtgtttcatattttttaatgatgtgcctgagattgcgagattttaacatttgattacagaattctcttggtagtattttgagatggcaagcgttttatatgtttgttttgtgtgtgggaattttattaaaagatttgatagcaaaatcatatcttctcttcttagatgggttcatattgtttgtgccctgtatgttcctggagtagcctttggagatattgacaaattacgaccagtaacactaacggaaatgaactattccaaatatggtgccaaggtgagacacaaagcatttttgattgcttgaaagagaaaggttttacttgttagtttacctggctttttatttgtattatgttgactgcagaaatgcttactaggaatcattctatttagcactaaatcatttattattgatagtagttttcctagaaagccaataatgcataaattcttctatacattcttaatttagagtaacgtatgaggtaaaatgataattggtactactaccatttccctggcagtgttcacaatgcctaatacatagaccaaaaccttatttacaattagatggatcaaatataagcctaatttctgactttacttttgaagtggaatttgtcaaaattatgaaaaagaatattagaagtgatctttgatgctgttactgtaattgttttggggcgtgccgttaacatgcccttaatagatggtgaacttaattgatatatgttatgtgtgttctgactgcttcaccaacctggtgttcccctatctttctccctgacttggttggggcctctctgttcgctgagacacagtgaaattgaaatttggccaattagggctgggtgctcacgcctgttatcccagcacttcgggaggccaaggtgggcagatcacctgagattaggagttcgagaccagcctggccaacatggcgaaacctcgtctctactaaaaatacaacaaattagctgggcgtggtggcgcgtgcctgtaatcccagccactcaggaggctgaggcaggagaatcgcttgaacccaggaggtggaggttgcagtgagctgagattgcgccacggcactccagcctgggcgacagagtgagactccatctcaaaaaaaaagaaaaagaaatttggccaattaataattctacagtggcctctaagtgttcaagtgaaaggaagagtcatacatctgtcactttaaattaaaagctagaaatgattaagcttagtgaggaaggcatgtcgaaagcctaggtaggccaaaagctgggcctcttctgccgaatagccagtatgtcagtgcaaaggaaaagctcttgaaggaaattgaaagtgctactccagcaaacacatgaatgataagaaagtgaagctgccttattgctgataatggagaaaattttaatagtagggatagatcatagcagccacaacattcccttaagccaaaacctcatccagagcatgaccctaactgttcaatattgtgaaggctgagagaggtgaggaagctgcagaagaaaggttgaaaggtagcagaggttggttcatgaggtttaaggaaagaagccatctccgtaatataaaagatgaagaagatgcagcaggtactgatggagaagcatcagcaagttattcagaagatttagctaagacaaatgatgaagatttgtacattcaacaaagattttcaatgtagatgaaacagtcttctattggaagaagatgccatctaggacttaccatagctagagaggagaagtcactatctggcttctaagggcaggctgtctctcttgtttagaggtgaatgcggctggtgactttaagttgaagccagtgctcctatactattgtgaaaatcctagagcccttaagaattatgttaaatctactctgcctgtgctctgtaaatggaacaacaaagcctgtgcacagcacatctgtgtaccgcatggtttactggatattttaagccccttgttgagacttactgctcagaaaaaagattcctttcaaaagattactgcttatcgacagtgcacctggtggtcacccaagagctctgatgaagtacaaggagattaatgtgttttcctgcctgctgtcacaacagccattctgaagcccatggatcaaggagtcattttgactttaaagtctgattatttaagaaatacatttcataaggctatagctgccatacatagtgattcctctgatggatctgggcaaagtaaattgaaaaccttctagaaaggggtcacttttttagatgtcattaagaatatttatgattcatgggaggaggtcaaaatatccatattaacaggagtttggaagaagttgattgcagccttcatggataactttgaaggggttgaagaattcagtggaggaagtcactgcagatgtggcagaaataacaagataactagaattagaagtgtagccaaaggtgactgaactgctgcgatctcatgataaaaatttgaacagatgagaagttacttctcatggatgagtgaagaaagtggtttctcgagttggaatctactcctggtgaagatgctatgaacattgttaaaattacaacaaaagacttaggatattacataaacttgattgattaagcaggaagagggtttgagaggattgactccaattttgaaggaagttctaccatgggtaaaatgctgtcaaatagcatcacgtgccacagagaaatctttcataaaaggaaggatgaatctatgcagcaaacttcattgttttattttaagaacttgccagccgggcacggtggctcacacctgtaatcccagcactttgggaggccgaggtgggtggatcacgagatcaggagatcaagaccatcccgggtaacacggtgaaaccccgtctctcctaaaaaaatacaaaaaattagccgggcatggtagcaggtgcctgtagtctcagctacttgggaggctgaggcaggagaatggcgtgaacccgggaggcagagcttgcagtgagccgagatcgtgccattgccctccagcctaggtgacagagcgagactccgtctcaaaaaaaaagaaaaagaaaaagaaagaaattgccaggctgggtgcggtggctcacgcctgtaatcccgacactttgggaggccgagttgggtgggtcacctgaggtcaggagttcgagaccagcctggccaaagtggcaaaaccctgtatctactaaaaatacaaaaattagctgggcgtggtggcacgtgcctgtaaccccagctactcaggaagctgaggcaggagaatcacttgaacccagtaggtgtaggttacagtgagccgagattgcaccactgcactccagcctgggtgacagtgtgagactccatcaaaaaaaaaaaaaaaaaagagagagaaattgccacagccactccaactttcagcaaccaccaccacccccatccgtcagtggccatccacatcaaagcaacatctttcaccagcaaaaagattatgacttgctgaaggctcaagtgatcattaacattttttagcaataaagtattcttaaattaatgtacttaacattttaaaaatacataatgttattatgcatttaatagactacagatagtataaacctaacttgaaaatacatggagaaactaaaaaattctcgtgatttgttttattgtgatactttattgaagtggtctggagctgaacttgggttatctctgatgtatgcttgtaaatttaacagaggttatttgagcattaacagatgtatttattgggcagcacttagaactagaaaaggctcagagatgcccacttcaatagtgtgagcagtgggcttctattggctgaatgtggaaccaaagtaaggaaattacttaattgactacagctgtgttgtttttctgtatgggtatgatttagtagaaagtgtccagttacgttatctgatgtctagttggctgttgtggttagttgaagcttgttttttttttttttttaaatttaatttattacaaggaatttttctaaattaaatttcaccttgtgtaaagttccatgtacagaaacaggtccaggctaatttcctcttgcttattttgctttaagaaaacatcactgggaaactgagttgaaaattaggtactctctggcttctctgcaaaatcagatacaatgttgtaaatcatgactgggacagccttctagacctcattgtctactcattttccaatctgaattatgttctcctgtgttctcagttgcttagttcactagcattttaaatgattcaggcgattgaggaagattctgttttctttgatagattgttttatagtctaaaaaggctgtcaggaatattttccttatattcactctgaaatcccktgctcaatttcaacatattacatgaaattatccagataatctaaacaatatgtctctgttcacagtgtggacatcctttaaataatttaatttctctttatctctctygctcaatctcatgtttagattgctatttgccagtatattataccatttatgttctactgttattagagaaattatattaactaggcagtaggatgtcaggatttgactattgaagtttttaagttttccttgtatttgtttccttcttatgtagttcactttgaatacttatattaaacaattctttaattgtccattgtcagtctttcataatttaacatctttttcttttatgaagatttctgttaccagagtagtttaaacttttagactagctaattccccctttttcttttaagagatagttaaaggaataaaaaaataaataaatctgagaggatttgcggtaatttcaacagttcataccttggttttataaattttctctttttatacagaaagaatgtacataattgactgtgttgtatattactaccaatttcacctgattattaacctaaaattacttttagttgtcttaaagatatttaaaacatgcatgatttctaggttgtaatgcctagattttttgttggattttctctggtctcttgtttccttttccaagcaattttatattgtttaagaattagtatagcttgatggtgggctttaaagtaagattgtcctggtttgaagccttacatttactttctttgttatttttggcaagcagatttcttaacttgtctttactttaatttcctcatgtgtaaaatgggaatagttatagtatctcttcttcatagtagttgtgtttaatgattacatatatttatacatatagtccttgacttatgatgggtttacatcctgataaatccattgtaagtttaaaatattttaagttgagattaatttaatacacctaacttactgagcacagcttagtgttgcctacctttaatatgcttggaacatttacattagcctacacttgaacacaatcatctgacacaaaactttattttataataaaatgttaactatctcatgtaatttattgaataccctactgaaagtggaaaacagaatggtcgtatgggtactgaaagtgtggattctgctgagcgtgtattgtttttgcaacattgtaaagttaaaaaattagaagtggaactgttgtaaactggggactgtctgtatatgtaaagtgcttagaatagtgactggcacatagtaagtcctcaaataattttaattatggttgtattattatttattatcattaaattagttgaattttgatttatttgaaccatataggtaattacgttttttcatataaactcttggctcgcctatgattattgtttgtattggtacataattggttcattatttgtatttagcattttaaatatttagtggacactttgtatgagaatgcagtctttagtctggaaataagtttgctttgagaatttttctgttactttgttgtaggagtgtagcttttgtgaagaccctcgctttgctagaactggggtttgcattagctgtgatgcagggatgtgcagagcctatttccatgtgacctgtgctcaaaaggaaggtctgctttcagaggcagcggcggaagaggtaggtttatttaaacccatagttggtgaacatgttcacaagatatcttttgactctatgtcctataataagtgtaaataataaaagaaattttaacatttattcttaaagttcttgccaagatcactgttctaaaactttaagagtaaatgcctatgagttttgtcagttttaaagctagtcagacgttcagaaaacataatttttatagtgagatctgacagataaaatgaaagataatccaagttgtcttaaagcattaaaatgtcggcatttcagccccatgaattatagttaaaaaaaaatagcatattttatacgagaagctgaaactgtatttgggtaaccttgctctatttttctttaaataaaatcattactgtgtctttagtatctctgttactatctctttactgttacttttaattccataatattcctttcagatttattggctttacgttaaaaaatcagttgttttcagtgtttggggactggttaagattcgttcaagtattctgagtttaaaactattttcattacactataaaaatgttacttacttttctgaactctgttctttcatgagtattagtggagacttccagagattacatacagtataacagaacccaccgaatatagaaacaattttgagaatccagctacctttttttatgtcagttatctagacattagtatgtaaaatgtaaaacagtgccactctcctcactcaatttttgtgtgtatgtgaattgtatttagtaaaagtgtatacttcggtaatggacccattatttaaaataaattaatgaatattgcaaaaaattttcagttttaatttttaatagggtaactgtctaaaatataactcacataaaccctttggagtcctcagtaatttttaagaatgttaacaaattgtgagcaggttcagttcattccttaagcttacatagtaatgaatgtttatttagtaatttttattgcacattcatgatggctttatggtaatagtctaagcctctccttgttatgttttttcttttattgggtaaattttgtttattgtgctgagattttatcttagtacatttatttcatttccagaaagtgagcaaagatactctgatgaagaaaaattgtagaaaaaaatttgaaggatatattttatgaataaacagatcttataggaattgtatttttgatacatgtagctgtttttgatacatatagctgttccaatctcttcatttatatagctgttccagtctcttgattttaaggarttgtactttgatgaaggctactagatgaacagtgagcatcttctcagctactaggtagacatagagttataattatacggtaaaggtagtctggattcctcatagctacaactcaggatrgtgggcaaaagtacgagagggcaatacaggtaagagttagaggaccagataaatactacgtaaatacttggatcagggaatctataggataaggttagttgtctacttctggaaaactttgagctttgcggttagtagggtgcttttggagccagtggagagctttcttttttactatggtagtttggattcctttgcacagcatcatatgtcatcatttttggcaagatggcagctaattaacaaaaatgtgtgaagcagccatgtttgggacagtggggtgtaatggagttatgggatttggagagtgcatctccgtctaaaggcatgcaaattaaatgaaactaaacataatattaagctacatagtttacattctgtggtctgtgtatcttacctataagctaatttgaggaaatttacagggaaacagatacattaggatgtgagaattagccctgaggcatcttccttgccttgctgtgtcccttgattaattaggtgggagccctggatgctggaataataaaatgcaacttttctccctattcactaccttactcagtgtgctgttgttttggggggaaatgatttaaagcatatttacatatatatgttactggtttcttgttataaacagagaattagaaaattctaaatgttttctgaacgatatttcaaaacccagaatattgcatgaatcaatattaatgaagtttgcatttgacagtaatcattctgtcttgtctatttctagatggttgtacttatgtacataaggatttatgtaatgtaatagcatttaaaattaagaaacacattttaaactaaaatagatctatgtttgtgagcatatcttgccttctatttccattttatactctttagacattctagggaacttttcaaaagactatatcaagttggatttactactttttcatggtggttttatataggctgttaaaaaaaaaaggttgaaaaatagaataaacatatcagtttcatctaatgacattgtgtacctttctgtattttttatgactttgtatagccttctgacatagtcctttatctcattggtgagaatccatgtgacatttctattctttttcatctactttgtgaatattccagatttattaagaatagtcaaagcatgttatgacacaacatgctttattagaaggatatttaaaaccatgttatgacacaacatcttatttttaaaactggactatagggctgggtgcagtggctcatgcctgtaatctcaacactttgggaggccaaggccagaggattgcttgaggccaggagtttgaggccagtttgggcaacatagcaggaccccatctctaccaaaaaaaaaaaaaaaaaattagctgggtgtgatgttgcctgtagtctgagctactagagaggccgaggtgagaggatcacatatacccgggagtttgaggctgcattgaactatgttctcaccactgcactcagcctggagaatagagtgagaccctacctctaaaaattttaaataaataagtaaaaaaataccgagctattgtgcaggctcagttatgctgactacaacttatgttactatgttttacattatatagtctaaagttacttatagtccaagtaagccatatggtagtttcttctgtaattaaagtataatttggtgctattgaacattgctgtactctgttctgtagaaaattatatttgaaacaatataaaaccgggtgtggtggcacacgcctgtaatcccagtactttgggaggccaagccaaggaggatctcttgaggctggcctcaagaggattttgagatgagcctgggcaacatagcaagacccaatctctacacaaaatgtaaaaattagccaggtgtggtggtgtgtgcctatagtcctaactgctcaggaggctgaggtgggaggattgctgagcccagaagttcaagatttcattctattagagcatatatggctgaggtggggtggacaagaatattgataatgcataattaagaagataagtttgatatgccattaggttattattgtatttaaatgtttctggtttcagtaaacacatcaattttactattaagataccagtaaagcgtaggtacgttcttcaaatacactgtttttacaagtgccaggtaaggttctcaatgtacaagaccgaagttgtgtcttctttcagtttatataactttgatctgctatgtcagttttacccagggagctttgtttaaaaaaaaaaaaaagattttaagattctagaccaaatcatggcatctagaggaccacaagctaaacttaatccatagatggattttgtttgttaggagtagagttaaaaaagaaaaccttgaatttaaatgactttagatggggcattccagtttgccacaggctctaagttctcacaggccccagcatttactaactgcttctcatcattcatttttgtcttatatttttctggcatcttttaggtctccttcacccatttatgttgactattactgcttctcaaggcatttgtatttaaggcccttgcctcagctctgctaagtcagaatttgcagagttgggctctagttacctctatttagaaatctccttaaatgaatctgatgacagtcaggtaatggttaaggaagatggatcttacatactggacataggtcttggttcagcaacttaacctctctggctttcagttttctatccataaaattgatattaaaatggtagaacccacctcatgtggtagtggtgaaggttaaagagatagtatatacaaaagcgcatgtgcttatttcatggtagatattcagaaacatgtttttccctttctgtcttccactgggagtaggatcttgaaagctccatttctccaagcaggttgaagggatattccatgtcaaccaatgcattaattaggacattattttgactggtttaacaaaaccaagtaacgagttgcttaaacgaagaagttgaattcactctaatatacaattccaggcggattggatactgaggggagtttggttccagggatcagttcccttctttcttcttgcttcaccttcctttagtctattgcactctcctacacagtcaaagatggtttatcaccatcttgactggattcttcctcattggaagtagcaaagaggaggttaagagtaggcagcttcctttcaagggcatggtctgggcatttcatacaacttattggccagaacttaatcacatggccacatctagctgtggggaggctggatcagatagtttctagcagggtagccatatgcccagtaaaaactcataggggtctagtactaatgggaagaatggatattgtaagacaattagtagtttctgccatagtaagtattggtgtttttcttaagtcagagtcttggtccaaatgcttaactcacctatgcaagcatgaatcctatctctaatgactcaatttcaacctcatttactttgaaacattagaataattatctagatctgggtatttgggctgaggttcggtataatctttatttccatttaacatctctgtcaccaagatttagagcatgtcatgagaaagcagctgtttgtatgtgttaatgtagtctcctaattaatttttgtatttaatttttaaagctatatgaagtaattgtaagtaaaccctgttttactaatgtggtaactgaggcccagagatgttaagcaattttttgaagtcccatagcctgtaaatgatagagccaagatttgtatccrggtttttatgtcttcaaattctgtgatacacattgctgtactgtgacatctatagatatcacactacagaattgcctcatatgctttttttttaatattaaggacacattagatttttttttctttctgttcttatatgtctctcctcggtagtgttgtcatttctctttgggttgtaaaactctacttagagacacttttgacataacttagagaaaaactaatagcttatgtttactgttcctttttgggacagacataaagaatgaacagcctgttgttttgttagcaattacattgtaaattacttttttgtactacatctttacaagttgtttttgatagaataaatattcttttttgtacactactttttatgaatgaaaatgtactgttaggctatgagagagctgtaattccacttgagtttttagggaaagagttaagggcataacttaaatttttttattgacagggcttagaatttcttaattctatttttttttttttttttttttttttttgagacagactgtcgctctgtcacccaggctggagtgcagtggcgcgatctcggttaattacaacatctccctcctgtattcaagcaattctcctacctcagcctcctgagtagctgggattacaggcacatgccactgtgcctggctaatttttgtacttttagtagagacaggcttttgccgtgttggccaggctagtctcgaactcccaacctcaagtgatctgcttgcctcggtctcccaaagtgctgggattacaggcatgtgccaccacgcctggcccttaattctatttttatcctcagtagaatctgtccattgttagccagttagaaatgccacacttatcttgttggctagttgaatgttgttgttttgcaatattagtttatgcataactttaatatttaatgattatttctacttaagattattaaaatcctatttgttttaaacagtgactttttaaaaaaatacagccggccctccgtgtctgtggattacacattcttagattcaaccaactgcagatcgaaaatgtttgaaaaaaaaaaagcgtaataaaaaagaatacaaatataaaaccaatacagtgtaacaactatttgcacatttacatttgtgtattaggtattataagtaatgtagagactgcttaaaatatgtgggagaatgcatgtaaactagatgcaaataccacaccatttaacataagacgcttgagcatccacagattttggtatccttggggggtcctggaaccagtcccccatggatattgaagggctactatacaagtacacccaaataatacattatatttgatttcaatatctttaaacctgcaggccctttaaagaaaaacgttgttggtaatttgaagttgacatacaagatcaagtttctaaagaagtaatttttgtcattatgtacaaaaattatttttgtaatttattagatgtaactagcactagtagattctttgaaaaggaagtaatattcttttgtgttaggtcttttatgactcttgggagtacaaatgttcactatttttctgtgctttctttgtrtaggatatagcagatccattctttgcttattgtaagcaacatgcagataggttagacagaaagtggaagagaaaaaactacttggctctacagtcctattgtaaaatgtctttgcaagagagagagaagcaactatcaccagaagcacaggtatgggattcatgtcaaaacccgtatgtttttgttttaaggttatgtaaggattttacgtctcgtgtggcttccagtgacatgtgacgtataataggaagtttggttagttacctaggaaatggattgtgattaaggtaaatagtgagtataatttttggctgaatacagtactcctcatttagtcaaacagagcagtcctttataaagtaaattttcacattgaaaaatgtgactgtgaggaaattactctatcagtgcaatatatttattacatcttgtttcagtttgttcaaaggatttagtcagtttgcctatatttaaaatataattttatatacattaaacctatggagacaatagcagttattaagaagagaaacttcagcttaattagtttctcaaaactctgattataagttaggacagttgttactaggggcagatatagtttattgtaactcaaaaattatacagtataccttaaggatcattcatacctataatttgctttggtgtgagaagttctgattatctttctgtgaacatgggaataaaaatcaatgtaaaaatcttaaggaacatgtttcattttattatcttttaaaatttgaatacatttcttttataggcaaggatcaatgcccggcttcagcagtatcgtgccaaagcagaactagctcgatctaccagaccccaggcctgggttccaagggaaaaattgcccagaccactcaccagcagtgcttcagctattcgtaaacttatgcggaaagcagaactcatggggatcagtacagatatctttccagtggacaattcagatactagttctagtgtggatggaaggagaaaacataagcaaccagctctcactgcagattttgtgaattattattttggtcagtatagacactggtacatgcacattttcactgagaacaatttgttaatgaaaatgtttgatatactgttaatttttagaaatttattagccatgctgcatatatcatagagggatgtttattttcctaatatgttgtgggtttttacaaaatgctaggttcatttatttgtaaatatacttaaaagttttaaactatgtaggtttatcaatgtgatcatctttatagctagtttcttcctatgtcagtttttacttcctactaaagtaaaattcgatatttcatttaaatagagagaaatatgcgcatgattcaaattcaggaaaatatggctgaacaaaagaatataaaagataaattagagaatgaacaagaaaagcttcatgtagaatataataaggtaagttagctacaaaatatgcaacataatgtgatagatcttactgatgatttcttttgtgaatgtatggcatttcttttatgttttgtttttaatttcttctggagctctttggctcttccctataactcctactcctcattagcttcattatcatcactgtctcttactgagcactttgtgtgccaggcataattttgatctctttacatgtattatttaattcccagcttaactttatagtgtaggttataatcattgcttccattttcagggagaaaactgaatcctgaagaagttaaataatttgcccaggttcacacaagtagtcaagtcacagacttgacaaatgaagtcagttggtgtgaggccaactcatgtgactctgttctctatttctaatcaataaacattgctatagagcttcactttctaagtttgtagaaaatttagaaacttttctttaaattattatttatcttgaattatattataatgtttggaataaaaatttccaaatttgaattttcatgtacctcttcatcgtaatgagaaaagattcaaaaagaagtatcttataaaagcaaaatgtggttaaaatgttataccaagtataacttgacatataaaacgggtattgacttattgttagaaaacattttaagtcataaaaaaatagtaggaagtacgtttccaataatcagctacactgtgtagtaaaaagagtacttggaattagattcagaggacctggggattcttgctagttctgtgatcttggccaactcacaaaaactctatgatccttagtttttttcattgggaaaatagtggaaatacatcttgagagagtcacaaggattagttagcagaacatgatgttatataacaaactgtaaaagaaggtataaacgtagttaccattattagtaaaaatgccagcagaaaacaaaatgcttacagcaacaaatactgctgaataattggatagccttgtctctcagtggtattgtggcttgaatatattaaaaatatatggaggccgagcgcagtggctcatgcctgtaatcccagcactttgggaggccaaggcaggtggatcacgaggtcaagagatcgagaccatcctaggagtttgagaccagcctggccaacatggcaaaaccccgtctctactaaaaatacaaaagttagctgggcgtggtggagggtgcctgtaatcccagctactcgagaggctgaggcaggagaattgcttgaacccaggaggtggtggttgcagtgacacaagatcgtgctactgcactctagcctgggcgacagagtgagactccatctcaaaaaaaaaaaaaaaaaaatagatcgagaccatcctggccaacatggtgaaaccctgtctctactaaaaatacaaaaattagctggatgtggtggtgcacacctgtagtcccacctactcgggaaactgcagcaggagaatcgcttgaaccccagaggcggaggttgtagtgagccgaaatcgtgtcaccgcactccagcctggtgacagagtgagactctgtctcaaaaaaaaaaaaaattatatatatatatgtggaatagaaatgtagatatttcttaaattgtcagatattttaatgaagtttactaatttggcttactttgtagctatgtgaatctttagaagaactacaaaacctgaatggaaaacttcgaagtgaaggacaaggaatatgggctttactaggcagaatcacagggcaggttagtttctttccaattgctgtctccttcagttcttgctccctatatgattttcaaagaacagatttttgatacaactgtcatttgactaaccgaagaattctgtttgatcagggcctaatcctttgggataatgatttctgcttgaaatacacctagagcattggaagctgcctactgagaacctctagtttaatttggttgtttcaacagctatcttgtgtgcaaaattttttcatttgctctaactgattgacctgtcatttgtgatgaagcttaagacttgaagcatgagtttttcctactacattcttctttcctttaatttagcagttttagattccctgccacatttttttctttcctgtccttatgctgtatttttttttctattctttggatgtataatttaaaattaaaaaaggcaaactagagatattcatttttatgttaatttggttttcagctgtataagagatggttttttaaactttaatgttaaaatgtatttttcccctttaacagtagctgtgatcgtagttattaaaaaaaactttattcatgaacacctttagtctgttaaagtttttggtgttgaataattattgttagatggatttctttgaatgccttttttagtactgtgtatataattgataaattacagttttcgcaaatattttttattttttaaggatgatggagacccactgtttgtggtcctttcactaaaaagtagttttatttgtgaaggagcttttcgaacagatatttttcattatacttgttttagaggtttatggagagtcaaattcatcacacagcttatttaaatattttaagaagtgatacatactgatttgtactgtgctataccagctttgaagatgctttatgtgaaaagaatgtgtgtggcttgtatcctaaagaatgttttaaaaggtgagaattagtagtcgcctctgggaggatcagcctttgttcctgttaataggttggttgatggatttttggaagattatgttttatacttaatatttagaggagttaatgttgagtataaggctttagtttatttgccaagctagcattatcttttggcttgatttgcaagtttttctcataagaatctcctgtttaaaatactatctaccataaaagacattttcatttattaaaagacttttaacagaggtttgcaaatttccttttgcaaatgtaaaatacacagcagaagtagaattcatttatactgcttgcatgacactttttttttcagttggttgaacagatgtgggcccaccaggccactgagaaatgactttgatagatggttgctgtctgagaagccagcatactacagattagtagaaacccaaagagaatctcacttgctttgttggagagtttggtccaataagataatttttctaattaacctatggaacaccaatatagctggggtgctgaagaaaataaatggcctcaatattctttttgtcaagtgtactgtgttttgttttttttaaacctcctacgtatgtgtctttgtctttgaaagctgaaatagaagtttaatttttatgttttagtgtaccactgaaaattgatgaaagtctgtaattatagatttctaatggaaataactattagaaaaaagctcattttaatcctttttgccaatgtaaaatctgataaagcagatttccccctaacaatcctactatatttacttggcttgagtggcaattagaggaaaatgttgcttttatttctttcttaaaacaatatatactacatttgttcaaatcaatagaagttgaatataccggcaattttgcgagcacccaaggagagaaaaccaagtaaaaaagaaggaggcacacaaaagacatctactcttcctgcagtactttataggcaagtaatgaaattaataatgatagaataatgttgtgtatttttttaaactgatacttattagaaagaagatcctgcaaatatttgagaatgaattatgtccataccagaatttaagtgcatttgaagttcattttctcaaaagatgcattccagtttgaatgatagaggagatttttgttgctgttttaacctaaactctatggaaatgagcagtaccctttggggaactggaaaattactttagataacattatagttattgtcttaaataatttaaacaatataaaagatgagcatttatattttattttacttgaatgaattgtagagtttgttttttagatagtgatgggtatcatatatgtatatatatagaatgaatctattgcctttgtaggcagtggataatgaagataagttttagttttgagtttctacactttttttctcttgatgctcagttgcaatcactttgttcgcataagtatttttgttttttactttctttgctcaatattttcggtgttcaccattatagtaattttattatagtcaagacttctttccataaataaataggttacgatctcactttttcccaaataattatattaagtgggagaagtttagaagatgctggtgtttttgtgtgtgtgtgtgtgtgtatgtatgtgtgtgtatatttatctatgtatatgcatacatatatgttatgcatgtgtaaatacataaatattcttctcaaaatttctttctcagaaatagtagcaataacaacaatatcaatctccataactaccttctgtttttttgttggaggctccctctacaagtaatagcaaataacttccttgaagtgtgggaaaagcctacattgtcttagtgtacaatgtgaacattagcacattctcaggccagctttttcaaacacggttggttcatttggaaccatcaggcaatatcactatgcttctgacttttatgactacaattcatttttgtttcagaatatattttaagtgatttttcttttttactgagaccaggtactggttatttatttatttattttggctttttaagtgtgtgtgtgtgtgtgtgacttttttctaggagtatttaaaaaaaaaacctaaccatcattgctttctgtactttccaaatataaatatactttagattttcaggtgatggtgcttgtgtacgcaggtgtagttaaattgcctttttgcataagagaagttagatttctgagaaaccaaaagatcctaaaataatagtagcaatcacaaaattccacaatctttgcaataaatatcaattgatgtgtgcgtttttaatttttttacttttgaatttaattagtatatttttaaaacgcaaaattcagtattgaaaagagactcatgtatacttgcagtatatctacatgttgaagactgtttgaaaggtttacaactaatggtaggaaataaactaccttctgtttgtgaagtaatttttttatagttttagaaaattggaaaattactttgttctataatttatgtgtctagagaaaaaatgaactaatgtgaaatgggttttaagtaataactaaaattaaaatgaatatgatgttgaggataaataccttatatatgtaattctttagaaggtttgactctagtagtatttaaatttttaccagatccaagctatttttaacattctcaaaagtatttagaactaacagttactgacattgtaaaaagatgtgttaatgaaagaaattgtctatctcaacagaagaaatagtaagttaaatcaagatgaaattttgtaagttgaaaaatatgctataagtaaactgtttcactatgataattattattgaaatctttacttgctgcctttattaaaagttgtgggatttgtaagaagaaccatgatcagcatcttcttttattgtgtgatacctgtaaactacattaccatcttggatgtctggatcctcctcttacaaggatgccaagaaagaccaaaaacagttattggtgagtaaaatagaggagatttagatgtttgaattgatttactcttagtttcagcagtataagatgaaatactatatttgttcataataaagtatttggcacattttaaaattgactgtcatcaatatttattatagcattatgtgactaaatctataacagcttttttgagaaatgagtttttcattaattgtggctattatcttagcaatagattcttctttaaggcatgaattctgtccattgcttataattctcttgttttattgttcagaatttctcaaatgctttattgttattttgaaattgaatttatctaaaatttgccatcatattatgcttttacttgcaatttaatattttatttttggattagagtcaaaggctttacttctggtatttggtatttgtgctagtcatttaaattcaaccattctttgacatctagaaacatttgataaacatttctgatttttttttttattaacttaggcatatcgaatcactacatttgataaaggttatagtatctataatgagttttatccttttcttaattttactccaagaaagggacagatgttcagattttaatagaatgatttctcataggaaggagaatataggaaaaggaaaactttggaatgaacatgaatattctttttatacaagttacctttccagttttagaaaagagtgaaccccaaatttttaaatggtaatctctacaagaggttgtgtgtgttcctcaaatacattaggcatattttttgacctcattgttttatcacttaaggctacctctgttcatttgattaggaagctgaaattttttcactattttcacatgattgcttttttatagtgttctttgtatcagtttgttttgagatattcatactggcctgttcttttgaaatgcagtggaatgtatttattatggtttttatgtgcttcagaaactgctatagcatattcaaatcccaacaatgttaataagcatcctgggtgagtttttaaattgaaagctagtttgatagtctccagagccaggatgttttgccatgaacttatatagagttatgcagttctctccttaaatgaagttatggaccctcctgatactgctcagcctgcagagctctggtttccagcatgtgagagtttctgcagctaaaaaaaaacacacacaaaaaaagggaaatcatgttctttgtagcaacaaggaggcagctggaggccattatactcagtgaattaacccaggaaaagaaaaccaaatactgcatgttctcacttacaggtggaagctaaacactggatagtcatggacataaagatggggcctactagaatggggagggaggggagcaaggtttgaaaaactgttgggtagtatactcactacctgggtgatagggatcattcatattccaaacctcagtatcatgcagtatacccatgtaacaaacctgtgcatataccccctgatctaaaataaaagttgaaattaaaaaaaaaagaaaagaagtaatgtacatagcctgaggtgttttagtgagagcacttctaaaagggcgtaaacaacttagagccttttcattgttgttagtggtttttaagtaaaagtagaagttaatgttgtagcacagtgaagcctttaatttctccttgtttctagtgataacatttcctttggcctctaagatcaacttagctttggttagcagttaactgggtgtattaattttggagtgtgcaagattcagagaattgttttttctttagtgtacctcaaatgtgggaggcagtttttactttttgctttttaacattttcagtttatttttgaagttatactaaagataataaatactcaaaacttaacactttctaaatattttgtcacattttactattatctatgctctagaggttatttaagtctattgcatctggatggtagaaaaaaaatgataaacgcaggttgagtatcccttatccaaagtgctggggaccagaagtgatttggattttgtttttgtatttgttttggaatatttgcattgtacctactggtcgagtatcccaaatctgaaaatctgaaatctgcaatgctccaatgaacattttctttgactgtaatgtcagtgctcaaaaaacatttggattttggagcacttcagattttggatttttggatttgggatgctcaacctatgatagttgctactacacacccttttccccatcctacattctgtgatgccatgttgataatttgaaattgaaattgccatagttaggagtatttgtactgtagaaattactaaatactacataacagggctttcccccagagggtcaagtgttagacatttactagcatatcactgactgatgtctgctttagactctaccttgttcttactagtcctttcattagggaaagggtcctttaatttctccttgtttctagtgatcaaatttcctttgatcactagggtcctgttactggactcttatttcatgactgtgccttagtctgcagcttgaacttccacaggtccctctggtataatatttctgaatggccggtttatttttgctgtctttatgttttgcaagcctgtggtagcacccttactactaaataccctgtaagcaaactgtacctagaattaattactatacaatctgttgccttctcagatatcatattctactctaataactattttaagcacttgctatccagccttttcttccagtaccagcactgttttcaaggagacactagttctagatttggatgctttcttcagtccatcccagagttctgtggactgtgctgggcaggttaagacatgtgacatcaaagaaaagatggatacagatacagaagtaattattggtggaaggtagggaagttgagtgaattcaccttggacaggctcagatatttcagtgatataggagtctrttgagagggaagagacctgggatgatgatgggctcttgagaagacagcagatggttggtaacaacttactgtggaaaaatcaaactgacttgctgaggctgtgtagcaagaatgtttagtgcataagtaaatgtgattatttgatttttcttgaattatgctctgctgcccaggagaaggagaggggaaaacctaggggcttcttaggttgggccagggatgtgaaaagctagtaaagaatattattaataggtgggtgaagaattccacagagaatagagaggctagtgatggtgtgatctaggttctattttgtttgtacctctttctagtatttaaaatgcattttgtctcatttttagtttatgttattttgatttttgttgttgtttttaaaaatgtacaatctccacactgccttaaattctaagacacatttggtaggatacaaatggtaagggcttgatttattagagtagttcaaatagttaatcatctcttaattttagaagactaatgttatatttctgcctccactcatctgattggaacttgtgttgccttttccaattgtttgaagaatattctgaaacacattatttaacagagaattgagtaatatatccttttattccttggatatgtctttattttatgatgaaaagaaaactcaaacccttctaggaatagtttacagagggttttttcctttgtttttcttgataatttgttcatttacatttttttattgcctcttcttcccattaaccgctagtaggaattccagcattagaatgggacatttactgtatatgaaataacaggtatatatctgctattaaagtttttacaggtattataactacaaaaagaataaaatttacaagttgagttaaatgttgttttctgcccttcaaagagatacccataatgcagaagtaggagggactgaggtattacttgtctgagaagaatgatatttgagccacctcttaaagttttatgtaggcacctgtcaagactttcctctaaatacaggagaaaacatggctaacggcttagacataagaaaaaaaaaaactctggtgtgggatcctgagttcttgatgactgaaaaagataaattgtggaggagaaaaaagtaaatcatgaattatttggaatatggaatgttactggatttatttattgcattattgcatttaaagattcataaaatcctttttttttttaacttacacgaataaaattctctaaattagtccactttcttttttttttctttttttgagatggagtctcgctctgtcacccaggctggggtgcagtggcacaatcgcaactcaccgcaacttctgcctcctgggtgcaagcaattctcctgcctcagcctcccgagtacctgggactacaggcgcgtgccaccacgcccagctaattttttgtatttttagtagagatggggtttcaccgtgttagccagaatggtctcgatctcctgacctcatgatccgcctgccttggcctcccaaagtgctggattacaggcgtgagctactgtgcctggcttaaattagtacactttcttgtctaagcactattaaacatttttctttagtaactaagattctgaaattccattgggtcatcattctgattataggttgtagttgtatggtgctagaaacatatagaaggtatagaaaattgagaaaaggccagacgcagtggctcatgtctgtaatcccagcactttgggaggctgaggcgggcggatcacttgaggtcaggagttcaagaccaacatgatgaaaccctgtctctactaaaaatacaaaaattagctaggaatggtgatggggattcgtaatccctgctactcaggaggctgaggtagagaattgcttaaacctgggaggctgaggctacaatgagctgagattgcgccagtgctctccaatctgggtgacagagtgagactctgtctcacaaaaagacagaagaagaggagggagggcaggagggagggaaagaaggaaggaaagaagggagggagggagggcgggaaaaagagaggaaggaagggaggaaagaagggagggaggaaggaaggaaaggaagggaagggagagggagggggagggagagggagggagggggagggaggaagggaaaagagaaaaacctcttggtatttcaacatgaaagttattctgttgcataaattcctgacatggatttttattatactttaaatttttaattggcttggatcaattaaaaggttaagattatcttcagtattgtccatgggaattataaattttaggactctattctcatacagtgtgctaagtaaaaatatatagaattaaggtgagtttagctaaattaatagataatagcagtttagtggattattgaaagaagccaggtatgtatttgactttaggaaagataatcatgattttccttaaaatattatttgatttcagctgggcgtggtggctcacgcctgaaatctcagcactttggggagggcggggcaggtggatcacgaggtcaggagttcaagaccagcctggccaacatggtgaaaccccatctgtactaaaaatacaaaaattagccaggcatggtggcaggcacctgtaatcccagctactcgggaggctgaggcagagaattgcttgaacccgggagatggaggttacagtgagccttagatcatgccactgcactccagccttggcaatagtgcaagactctgtctgaaaacaaagaaaaaataattatttgatttcattgaattagacaggccatggctttattctaggttattatttcttaccatcttgtgtaccaattaatgtagcagaaacattttttacatatcttaaaggatatttataagatgaagactatagtgtttaatagattgttgaagaatggctaagaagtattatgtccataatactcttgtagtctactcagtgtggactctatctactgcaacaatcatgtggcggttgtcttgaaataggaatggatatattctgcattggcagttacatttgttttgattttttgagttgttccgtgttttgtggtgttcagggtgtaacatttctattttctgggaattagccaaatttctttgtcacctaactattatttatagtggggatggaagtgaacataagaataaagaatgtcctgacaagggtaattgctaccaaaagagaagcgaagaggaaatatttcagtttttaaaacaaaacaaaacaatgatttatctgaaaaggtacctgcttctatacctaggggatttagataacattatgtttgcctgttatttaagtagacaaacaacatattttaaaagtaaattagagcctggcgcggtggctcacacctgtaatcccagcactttggaaggctgaggcgggaggatcacctgaggtcaggagtttgagaccagcttggccaacatatagtgaaaccctgtctctactaaaaaatccaaaattaactgtgcgtggtggcacacacctgtagtcccagctacttaggaagctgaggcaggagaatcgcttgaatggggaaggtggaggttgcagtgagccgagatcgtgccactggactccagcctgggcgacttagcaagactgtctctcaaaaaaaaaaaaaaaaaaagtgtaaattagaactgtttgagaaactgactacatttcactcaactgatagaaatgatcagttagcattaagattacaatttaatgctgaaaagtgaagcagtgtgcctttttgtaatataatatgataatttctctagtcatctgttttgaaggctgttgcatttattattagttaactaacaatatctaacatttctggggttttcacagttctgctaataaagtcagaatatacttatcatttcaattctgagattctgtaaggtgtgtattttcttttgccagtccttgatgttttcatatgggacaaatgcaggagcaatttaatatattcgtttagttgtgtctttgttaatgatggtaatctgacaacctaggggataacctgccagctatatttacatgaagtgtagcaatagatacataaaagttttctgagtaatacatgattatgtacatttttgttttgctttcactgatcagtatttctagtgctcaaagttttgctaacctattcttaaataattggaaattttaagatatttaaattaatacgttaaggattaatttgtattttagtaataatatgtttgcattaacaaaacaaatggtacttggtatttaactcttgttggagttcaaaatttaaagctgtcactttgacaattaaatattagtttaataagttcacagtattagtgaaagatgtgaattttgatggaacgaaatcaaatcataaatctttgaaaatacttgctatgagaattataagctacattcaaagatactgatataaacatataaactaaatatcaaatacaattttacagattataatcatttttattaagagaatactatcaaacttttggagaatttgcttttgatcattcttttacatttgaagaaaatatgagtaaaaatttacttttaacaactggttttaactttttgaaatggtcctttatgattgacaatataaagatttccagcagttgttgtttagatttctgctgtctaaatgttagccactagccacatatggctatttaaatttaaatcaattaatattaaaatgagaaattttctcagtggtatttgccacatttcaagtgctcagtaaccatctatggctagtggccactgttctggacagcacagatatgtagataatcctaatattataaaaagttctgttggataccacttgtctaaagttttagtttcaattaatttttaatattacccatattaaaattctttataaatgctactttaacaaattcctttgataaataaatgtatatttcttcttttagaagtagtaggggccaccaamtaatatgaccttttttttcccccaacacttcttggagtctgtttgtatagtttctttaagtagtatattcagcacaagttgtcaytgactacaattaaaagatatgataactgtgacaaggagtagtgttagggtccttgaaggactttgattttcaggtatcacagtatatgtcatttaaagaaaagtcatgctttccaaaggtaaattattattattatttaagacagggtcttgctcatgttacccaggctggagtgcagtgttgagatcatagctcactgcagcctccacctcctgggctcaagtgactctttcacttcagcttcctgagtagctgggattataggcgtgtgccaccaagcctagttaattttctttttttttttgtgaagacagtctctcactatgttgtgagcagtcatcctgcctcagtctcctgaagtgctgggattatgggwgtgagccactgcagctggcaaaaccacctttttaatcagtgttgaatctcatgttggttcacttaaacatatagcattgttaaatgtgttcttatacttacaggatacattaaattgccttaaatattatattcatagtagtcactcttagaggagtatttctgaatgttttttcattatgtaccctataatcacattacctgtgtatatttttatatattattcttatatacctggattttgtatttataaaaactatagctaaagccagaagataataataaatgcatgacttaaatttttcccctttatgtaggcagtgctcggaatgtgaccaggcagggagcagtgacatggaagcagatatggccatggaaaccctaccagatggaaccaaacgatcaaggaggcagattaaggaaccagtgaaatttgttccacaggatgtgccaccagaacccaagaagattccgataagaaacacggtagtttattttttatttatcataagcatcatacaattctgaggccaaaatttaagagagtgagaaagacacagggcaaacatatactcagaagtcaaagaaaaagacatctattggttattcttaacaattttttttctatattatgaaatataccacatgcttacctgagtgtttgtagtttatattttgttggaggcataatataaggaacacaccagagcatccatcacccaccttgaaagacagaccattcccaaagctttagaagtttcccgtaaacccctcgacaagctcatctttatctgtctagcccagaggccacctctttactcagctttacttttctcattcacttctttttctttatagaagagatttacactctaaatttctgtacttataaataatacatggtttatttttgtaggttttgaatttcatatgaatggaatcaaatgtttttctctggtaatttgatattttgaccaaaattatgttgatttgattcagacatgctgatccatgtagttgtagtttatttattgtcactaatgtatagttttctatggaaagaatagattattacctagtttttcttttgctttgttgatgggcagttaggtttttttcatgtttttctattctatacagctttgtttaaaatattcctataaatatctcctgcagcatggtaacaaggagtttgtgtatgtattaaggtgtagatttgctaagttacagactatctgcatcttcagttttgctagataactgcaattgttttccaaaccagttcacactcataccagcaatggataatgtttctgttgcttcacaaagttttgtccagtgttttaatgctttccagtgtggtacagggaaaatagtatcttgacattttatgttgcatttctctcagtactaatgattttgttcatctatttacatatttttggtaaattgtatttccttttctgggaaatgtgtatgcaagcctttcaccagtttttctgttggggtgtttacctttttctcattgcaaattctttgaggccaggttttaaagagtttcttctggggaaatcatttatgttcatgtttaccaggtaccttgaaggggcctctaccaacttgagaatattttaaataaaagtttggtgtgtatgttttctattacatcaggagtgtaaatttcaaacctttaagtgctggcttacagttatgaattcttagggcatactttccttgcttgagctgaggcaggcacttttcaaaaatcttcctttccacaagggagatacaaagatatttttagggttagttgtcatcatttgttctgttacctgtttcattttaaagagtctttaattttttccttaaagtaacagttttctcaaaaaacattttcttaatctgtattaacctcctatattataatcacttaaaagatcttattcaggagattcagcttgattttttaaatcagttttgtgttatggggtcatataaaatttatgaggcaaatctttatctcttagataattgaaacagtttattttgggtgctctaagtagatcaacttgaaatagtttttatttgtagtttcaactgtttataactctttttttaggcttcaaaaatatattttgtttataagggaactagagagacttttcctttgttaaataagccggctagtttctatttctaaaatattttctataattgtttgaaaatggtaactagttattcttaagatcttagagaagagttattacttcgtatgtctgtctacaaagattatcctcttatgaaacattatttttccagtttctttattgtttcaagaaagccttttgactagtattatcatccttaactttggagttatcatatagagggaaattatgtatattacagtgaaatttttgtgcccacagttcagtattacttgagataaaagagaactctttaacattaaaggatccttctatttttttctcacctttactggtctgctttttttatcctagaattataaggaagctttaaaatttgctaatataatcccattcctttcatcttgttctttgtctctagttttcttgtttaaaagttttagacttcttacagattttggtcagtgaaacaccagggaaagagtccatgaccagtaatttcaggaaatgcagtgtgattattttcttacttgtagaaattccaatgcatgttgaagctccaaaaaaaaaaaatcctaatatttagaaacaggattacttttatctattctttttcttaacttgtttttatcaaaaaagcattttttaagacactttttttttggtagcatagagtactgtgtggtgctaagtttggaaatgatgctccggagaccatggattacttgcattaggaccatcttgggtatttgttgaaatgtagactttggacccaccctagagctagtatagactttggacccattctggaattaatcaattagaatttaggggtttgactaagcagatttcttaggtgctacgcttatactaaataaaagttgaaaataactactaatggtgattacctttcctttttccctctcatcttttctgcctgccttccaacaatccattcagaaaaccagacaattggtgcgaggtatcatactaaactgttcaaggaatgtaggaatgagagatacagaagggagtgatcagtcattttggtcttgatcttaccatttatgctgagttcctgttgttaccttaagtttttacttatttctatttgagttgtatttatcttttttaatcaataggtggtatggtgaaaaatgaggtgttctaattgtgtttcttagaacagtgttaattatgagagaccaggcatacaacagcttactaacttgtataaataccttttgcaatatataactaatttttctctcccattgttacatttttaaactattgctcccaatatcctcctacttacacttttatttcagcacaggtattacaattgggaacattctgtcttgtaatacattattatagtatttttatttttgtcagtttttcatttttcctgccataaattgatcaaagtataatttgttttcatgttagtcttattattctgtcatgattttgaagaaaattttaccttcatgacatacgtagggcaatcatgacataccccaagctcatggacctgaactcctggcagacagcaactgccctgtttaccacagaagaatgggtcccattcttcttatgtttcatcagtgaaactatagaattattgtaaaggcagcctgagatagttctgtttaagtactttgttatttagacattttctctgcattattttctatgtggaaacttttacttacttttaggcaaggaaattaattttgaagaaaacataaattagcttacccatatcccttttgaagttactttaaaattggtgtttatacttgtggacatattttctaatactctaatgtaacttgaaagctttcagattttctttttgctttctttgcactctaagtcatgtagtgacttttcatcttttgtagaagtgccaaaggacttgttgggacctctctttccattgtttttacacacacgcatgcatcatctactctctttgaagttstgagatctttcttcctgacttacaaattckggttgtgttttatatattttcttttttgcaaaataaatgcaataaataggcaaaatactttttagcagctttgactgaaaaccatattgtttttcaggatgcattatttcttttagatcattattttagaaggagatttaaacacatctaatcgtttttccatcgcacttaacaatgtgagccactagccagttctaagtggcagtctttatttgagagataatcaaatatcctagagcctacttttattacatttatgttttaactaattttacgcatatacaaagtacctatttaataatgtttaagcttaagtcttgagaatctgaaaatatgaaatatgtttcatataaatattttttagatgttagtttaggaaaaatgttgaagcatttggattcagttctactgaagtgactaaaggttactgtacattatgttcatatttattttacttattcttatactaactgtttgaattactacagttctgggaaagaagagttatttgtgggggctttacataccagagttttctattatcagactcaaggtgacctctgaggtacgagtcagattataaaacctctatctgtcatagattcttagaagaaaccctggcaaacagtttttgtagtgaactagaactcactttggctacttggaagagatctactctgtgggtgtccttagctcaagtaatcttattcagaaccctgagactcctgttttgctttttgcctcttggaaatccatcacttttatttattcccaggagtatgaaataaagataagaataggtggagctttcaagactttccttattttgtatataccattatctctgagaaggtttttatagcagcacttacttgtcatgtagaatacatattttattatatatcattagacccatagttakttcagtttatagtagttaagacaaattggttatgattttctttttattctcccatatattttcataaccctgttaacataagctaaattagataaaaagaaactctacagtcaattgaccaaagggaaagcactcacttttggtgactgccattccattggttgtttattggtagccaacagaaacagatgacaccttgttcataatttgttttttgtatatagcaattttctttgaatatttcatgaactttaacttgttttcaatgcagtttcataattgaaagacaaatatttttaggaattatgtatatgtataattttatattttttagaaattatatttttattatatattgctacatataatatatgctatacatataattttatattcttaggaattaaatatatattatatttttatatattagaataaattttatattgaagcatttttgaatagctgccagaaagctactggcatttattccccagcataaatctaatgctatttagcttaacagaggttttcaaagtttgacttaattgtcctaattaacattgattttggaattttgcccatgaataagcatgttctatttttacatataagttgcagagggaagcatttcttatgattcaccatatgtgacttactttaattattaatttgtataaayattgatatgtcaacaaaaacacaagtgttaaatttagtgacctggtcacaagtgaatatgtgaagcctagtttactgatatcaaagatgttaaggtactgactcttttagttttaaatttagttcatttgccaaatgaatcatgcatttgacttgattgcaaattaaaataacctcagctctaaagaattaattaaaatacattacatgttttttagtccaaatgatagaaaagttagagaaatgtttaattatttgttttagatgaataaactatttatttacttatttttatttttatttttttgagacrgagtcttgctctgtcgcccaggctggagtgcagtggtgtgaccttggctcactgcaacctccgcctcccaggatcgagcgattctcatgcctcagcctcctgggtagctgggattacaggtgtgcaccaccacgtccggctgagttttgtattttagtagagatgagatttcgccatgttggccaggctggtttcaaactcgttacctcaggtgatctacccgcctcggcctcccaaagtactaagatcacaggcctgagccactgtkcccggcctgaataaactatttaaaagttgcctgctagataagataattttacaccttttcagtttaaatacattgtctctaataccatgccaatctcttctatggattttttaatcacctcttttcaagtaagttgatcacggacagattacgagcaaggtgatttaagcagctcaggttgtaattgttccctagctaaatcaagttcttaaaaaaaagaaaaacaaaaaattggaatgtgtcaagatttggaatgagttttaaactttcatttacttttaataggttagctaattactgtcaaaattaatcagtttggaattgcacccttgcttgattaatcatgtggaatttccagrtaacgtatctgtgttacattctaaagcacattcttgaaaagtaaaattcttccttcttccacatattattttcatcctacagttttattgttgctaaagtagtttcagcctcaaaatrtatcagaaaaggaccacccagttatatatacttctattcatctgagatgggacaagctctttggtaactgaaatttgtcagataggcccaacttattttcgtttttcttgcttttttgtaccatttctccctcttttaaattctacttatgttttgggattcattcaagtacactactttcaagataacttgt

SEQ ID NO: 3 - DNA, 89900 bp, Homo sapiens
aaacccagagatgttaaaagacacattaaccagttgcaatgtagggttcccatttggatcctgatttaaactacagggggaaaaatgaatgttggccaaatatttgatgatattaaagtcttattgctaattatttgagctctgatagtgattgtgagtktgtttgtttgtttaagttctttaccatttagagatacataacaaaatatttacagatgaaatcacgtgcttttgtggatttgcttcaaaataaaatgaggtcagggagaaaagtaaggagtgcgtatagatgaaacacgattgaccatgagttgaacattgttgaagcagggctacatggggatgtgttttactattgtcttcagttttatatgaaggtgaaatttttccaaatgaaacatttttaaaaacatatccaggcagagccagaaaaatcacattcctgtagctgtctccctaataaaaaggtctttattctgttctttgcagcctagaagactagtgtcactgtagctgtagtaataacagtaatatcaataataataggccaggtgcagtggctcacgcctgtaatcccagcactatgggaggcccaggcaggcagatcatgagatcaggagttcgagacagcctgaccaacatggtgaaaccccgtctctactaaaaatacaaaaactagctgggtgtggtggcgcacgcctgtaatcccagcgactcaggaggctgaagcatgagaatcacttgaacccgggaggcggtgagtcgagatcgcaccactgcactccagcctgggcaacacagcaagagtccatctcaaaaaaaaaaaaataacaataataataataatacccagcattttggaagcacatacttgctatgtgctaaactcatttaagagtttttataaattttctcatttaattcagacgaaatcttatgtggtaagtactattattattcacattttacagatgaggaacctgagggacagaagtttggtgacaaaggtaagcctcacacccagatctaatggcagatttccggcttgtaaccaacacccaaaggtaaaagatgaagattgctgtcatgtcctcagtcttgccttctttgggataaacacctttagctctttcactccccaccccaccccacccctgccacatggcttcaatgccccacaccatccttgtcacattccttgaaacacctgccaggagccataaaagtagctgagcttctttaaggtatctcagaggcccatgtgcagcttgccccaccccgatcctacccaggctgcctggtttcccagacaagctgcggtcctcctccctccaggctgggagcctgcacatgcgcatgtcccaggagtggcgcagctcacctgggcctcggtgcctcttctccatccagatgtagcagttgttctgggccaccccagtctgtgagtccaggaagggaagacgcacgctgcgctctgcacacagccgtgagttgtaactccggcagtgctcaatggcttccttgtagaactggtccccgagcctgccagagtcagagagtgaaggggtgaggccagggaagactgaaacacacccagagggaaacacacccagagggaaacacacctccctggaaagactgaagacctcccagttatgaagaccaaggcaatgagcaccaagagccttgccaatgagcagaatgcaactcaatgtcaggtcttgactagattttattttctatcccaaatccaccaggcaacttagaaactcctttaacaaagagcatgggcttccaaggatgaatcaccagtaagagagagctgtccatgttctaggaagcatgaggtcccactccagaagggaagtagctctggaacaaccttctgcatggaatctagaggacatcacacttctagaacctcctcactcatattagctacattttattctcagaggtcaccagcaaaggcactctaggtgaacccaaatcaccagcaaagatactcagttttccattacaacagaagagaaacactccatataaacaaaaactaggacagaaaaaacattctataaaagtagggaaattgcaggaagaagggggtgtagaggaacaggcaccaatcttttaaaaccatattacttaaagaaaaataactttccgatagaaaacaaacagaattcaacaattttaaattcaaaataattcaactcatggagtttaaaaaacaaatagaaagacctttctggtttgctagactgagaatctgattaagcacagtatattttacgttcctgactctttggtatttttggacacgtggtgatgctactaattttaaggtagtgtccttttcaaagaccaaaaatggagcattgatataattgatcaaatgcaaagcactaaaataatcaatgagatcaaatacctaccaaataaaacataggcacaggttaataaatgcctcaaagaaatacaaatgtaataacataacttatgccaggtaaattcaagcctcttactggggtcggggggcagtggacgcaaaggagtggagtgtgggaagaagaagtaggaagggaaggagccacagagttcacaggggcaaaagggagaatcaagtgtttattctgaagcaacattatgatatctttttgttttggttctatgtagatttcagaaagccaaaatgagaggggaagtctctaaaaatatcatttcttaaccaaagtatttagaggaataaaaaaagcaaaattggggtgttgggttttttgggtttttttttttttttttgagatggagtctcactccgtcgcccaggctggagtgcaacggtgcgatctcagctcactgcaacctccacctcctgggttcaaacgattctcctgcctcagcctcctgagtagctgggattataggtacctgccaccatgcccggctaattttttatatttttagtagagacagagtttcactatattggtcaggctggtctcaaactcctgacctcaggcgatccacccgcctcagcctcccaaagtgctgggattacaggcgtgagccaccatgcctggcctcaatttcttaattgtggtaaaatacacataacataaaatttcccatcttaagtgtacagtttaagtgtacagttcagtggcattaagcacatgcatactgttgtacgaccaccactactatccattcccagaactcttttcatcttgcaaaactgaaacactatacccattaaacaataactccccgttccgcctctgcccccatctccagcaactaccaatctgctttctatctctatgattctgactactccaagtacttcataaaagtggagtcatacagtatttgtctttttgtgactggcttatttgacttagcataatatcctcagggttaacctatattatagcatatgtcagaatttccttcctttttaagtcagaataatattttaagtcagaataatattttttaagtcagaataatattccattgtatgcatataccacattttgcttatccattcatctgtcagtggatatctgggttgcttccacattttagctattctgaataatgctgctatgaacatgagtatacaaatatcttttcaaaaccctgctttcaggctgggcgcagtggctcatgcctgtaatcccagcactttgggaggctgaggtgggtggatcgcctgaggtcaggagttcgagaccagcctggccaacatggtgacaccccgtctctactaaaaatacaaaaattagctgggcctggtggcagacgcctgtaatcccagctactcaagagtcgcttgaactcagaaggttgtggtgagttgggattgtgccactgcactccagcctgggcgacagggtgagactctgtctaaaaaaaaaaaaaaaaaaaaaaaaaaacctgctttcagttcttttaggtatatactcaggagtagaattgctgagtcatatggtagctctagttttcattttttgaggaaccaccatactgtttttcatggcagctgtaccattttccatttctaccaacagtgtacaagggttccaactactccacattctcatcaccacttgttagaaagcaaagttttaaatgcacttttctatactctttttaaaaagtcaacgggtcaggttctaacaaagagcttaaagcaaatatcttactgtgggaaaacacaaccctggaagcttctgaggcatcatttggaaattacttgttgacaagcatccaaaaaaaaacaaacaacaaaacaaaaaccctttgctcctttttcacctctgaacatcttcacattcataagggaggcataatacgctcagaaagtgtcctggcagttgcaaaaccaaactgtaatcaaattgtaatagtcacgcagctggaaatgaattggggaggggagatgaaagcccattacaatgctataaaactgaatggcacataagctgatgtaatcaaagctggtaacaaggatcatgagattgatcaaaaataaagaaccactttttacaaagtgtttgtgtcacaccagcttaaatgcttccttctgctatggcgatgtagctcagtggaacagaactttcacaggcagcttggcccagacaagatgacccaggctgttcagggtatcctggatgctccagcccccacccatgaaacagcaagcagccataccacatcgatagagaactgacaagaacatttgacagagaggtgtccaacgtgagagcagcaatctgttttcccaggaccttctgacagactgccaaaaaaaaaagatgttaattatcccaacctcagaaattctgctgaaaagagaacccataaaatcaggccccccaaaaaaacaaaatgaaaaattgtatagcaaaactcatctactggagatgatcactttcaaaataaatttctggaaaccaatacaaaagaaatctacacagtaggattccaaattggacttgtcctaatatgctagtaactcacttccaacagcgtcaatccagacaagaggaacaagaaactgaacttgctaaaaatgcaaagtgaggttggccaacactggtgctccacaccaactggatcgagaatgtcaaacaaagtggcacactgggcgaaaattaatttcatcttaaatactttctactttcataacatgcaatgttattagttacaagcatgctgggggaaaatgtatatttctaaatataatctttgtgtgaatgatacctgtcttatgtaaacagaaaagactttctgtggactggaacaactgtattaaagatcgaagctgcaaaaacatgacattcaacagcccctctaccatcatctccagggaagtccttttaaacagaccaggtgttggcagagattcggaaccaaaatttaaagcctttttcaagatataagaggagaaaagagatttcatcctccctgataaattcaagaagcacttctccaaaagttaattagccaaaatcgtcacagggcttgctatgctctctagaagaaaatcaatgactagttctccctaacccgtagaaagcaatttaaacagcagaggacaaatgtcctttccaacatggtatttctgccaaaaaaaaaaaaaaaaatcccacaatgatgggatcccaggagtgacatttacattaaagttgaaggcgtcagatggagcagggaaaggctggcagcaaatgactcatctgtggagtggtgaccagtgtaccctgggttggatcacacatgggacagtcccagccatcacctgcatgcaccaaactgagggggctggatccccaagggatgattgatgtcttaggctagaggaagctggcacaaggcagggtagaatgatgttcttatcaacaactgacttcaggctactcaaggctgcaatcagaaataggaaaggcaagggaaacaaattgctgggctccccaggctccccagacagcattctggttgcagcagtgctggctgcctagttctagggggctttgtgagtgatggaggtmcttctgtgatcccatctgaattgagaagccagcccagctctgagagctgagtgtttctacatgagatttccagcaaccctccttgagcctatctgtggagatggactccagggggccaaagaagactcagaatgggaaagatgagacttctccaaagtgactgccaaccaggctccaaatgtgatttttcagagcccatcaatcacaacccctctaagaccctctgctcctcttcctccaacctcctgctctcaagaccacacctgcttgctccgatttctcagatcactctcaggtccagccagacacctgggctcctccctttcactgtctctctggttctgtgctctgacctgaggacaggtgtcctgccataccagaaatgtgagtccaatagcaagtttctcatcttctgccagaagcctgctcccgcccactcaagtctcaatcctcctaggggcgggggtgggggtgggggccgaggctatgctgccctccctctccctagcaacttggccttgactctccccttgccttcaaaccatctggaactgagttatttcatttatcaggaagtcgtcctttctctccactccccctgtgtggccccaagtcccctttgctgtgtaaacaggaccttggcccatcactactatctgtgcacagaagcagagataagcagagctgaagagaagccctggcctgtggcaggattgtgggggctctccttcccccagaggcgcctcttcctcactgtgggcaccaagttttcctgctgtctcactcagctgttcacaccgccagagccgcccacaaacacacacgaaagctcatctacaccaatatgctaacttcctgctatttgcatttaaacatgtttaactcaaactgttcatggaaagctccgtctcccatttagtcttttagaataactggcacacagggggcaatatctggcaaggtgcgggaaagtttttattttccttgaagtggtcctgttcctaatgcatctcttgaaagaagaccaagtttagtgtttgttacagactgaattgtgtcgttcctcctcacagaaaaaatccacatgttgaaggcctaaccctcaatgtgatggtgtttggagatggagcatttgggaggtgatatcatttgatatttacccctgcccaaatctcatgttgaattgtaatccccaactctgggggtggggcctagtgggaggtgtttagatcatgtgggcacatccctcatggcttggtgctgtcttcgtgatagcaagtgagttcttgcaagatctggtcatttaaaagtgtatggtgcctccctgctgactctctctctcttgctcctgtttttatcatgtgacatgcctcctccccctttgccttctgccatgattgtaagtttcctgagggctccccagaagccaagcagatgccagcactgtgcttcctgtacagcctgcagaacgatgagccaattaaacctgttctttataaattaccaaatctcaggtatttctttatagcaatacaagaatggcctaatccaggaggtaatcaggtcaggaggatggagccctcatgatgggattagggcccatataaggcagagacatgagcaagctctctcactctctcaatctctgccatgagaggacacaaaaaggcagctgtatgtgagctataaggaggactcttacctggaatctgaccctgctagcaccctcatcttgaacttcccagcctccagaactgtgacagacaattatttaagccaggggtcccaaacccctgggccacagagcagtaccagtccatgcctgttaggaactgggtggcacagcaggaggtgagctgtggggtacaagtgagcattgctgcctgagctctgcctcctgtcagatcaatggcagcactagagtctcatagaagcgcaaaccctactgtgaactgcacatatgagggatctaggttgcccactccttatgagaatctaatgcttgatgatctgtcactgtctcccatcaaccccagatgagactgtctagttgcaggaaaacaagctcagagctcccactgattctacattatagtgagttgtaaaattatttcattacatattacaatgtaataataacagaaataaggtgcacaataaatgtaatgcacttgaatcatcccaaaaccatcccctccccgaccccagtcggtggaaaaatgatcttccatgaaaccagtccctggtgccagaaaggttggggacttccggtttaagctacccagtctatgccattttaatacagcagctggacatgactgaggaagtgtttctggatgtttcccaaaaaagggctaaggaggacaggtgagagagattccaatcccctttccttccacattttttcttcttctaacaaagacaacaataataacactataatatcaatttcaactcaattcaatgtttagtatttgtcttctctactagactataaactccatgagggcagaggccacatctgcagagccactgcacacagacactcaggctgaacaactccagcaagtaccattcacatcagcgtcaatatgaaggccaccccctggagtggtggagcccagcactcctgcatacctgcctggccttcttgctgatttacccgcagtgttcagcacagagcctggcacataacaggtgcccagtaagtctccattgaaaagcatttgacaactcacattccactcacctagggcaggcatttaaattacagcaggaaggctaatgtggcatgcttgtgcacagtctgcagagtctgtgactggcaatttaaactggatggctgtccacttgcagcttcagaaaaacattgagagaatgtctgcattcactctcctgtagtcctcatcacccagcacctgggacattgcagcactgggtggcctaactgcaagcgctatagccctactcttacccatcctgacaaaaggaattctccctgaaactcagtgtttagtctttcaaactcctcagtgtagaacccaagatggctcccaatggtgcccaggttcctctgctgggctggggatgcacccggaaaaactatgtattggggtaaagtggaaaatcaagacttggaattggtcatgtctgagtccagctccacctcttaatagctacacaaccctcagcaagttacttaccctccctgggcctaaattctactactcacaatatgggtaatataatctctacttcagacctgagaaaatttaataagctagaacctctggcacacagacataaaagtctgcaatcaatagccattcctttctccttccccaaagtgcagtacttgctgccactttgtggcatgaccctctgcctgagcaggctgatacccaccatgtgatgcaacactcactattgcggtgtccttgaggctgtcggggacccactcaaacctctgtcccaggacagaaggcctctgggtcaccaaggctgagcctcaggcatccaggagagcagggcagctgatgcatggtgaccccagcaatccacccaaggactgccctaagcacagagaccacatctggcttgtttactgctctctcccaaagcctagtacatgctgggtcatgcctgccacattgggtaaatgatgartgaatgagtgaatgaatgaatcctcctctgacccccctgcatatatgaaacagacagccctacccctgaatctcaacaaaacactttacttatatccttcctcccacctggaatttttgtattctgtccttgtcctggctgatcttagcctagtcaagagctggctgaaaacttgcttcttccaggaaggttcacaggttatctctaccagtagggtttgctctctggcttctctgagctaccttatctgtcttactttatttttgatggtctttgccaccttccttatctctgctcacttaattagattggaagtatcttaaagacaggaactgagagctatgtgcttgcatgctacccaaccatgcacagtactgggaatgtagaagcatgtgatagatacattgcttgactgaactatcatgtcatcctcagcaaactaatgaaagcttcacagttgagaggtgcttggaacgttctaactttctccatgggaacatgaggtgagcctgaagttatctggctacttctccagagcccaggattaggcatctgaaaatagatatcctccaagttcaaatcctattgagttttttcccatatccttaaaaaaaggtcacttcagctcctgagattttcatttctccatgtgcaaattcatgctaccctgcaaggtgccacagaactgacattctccttctctgaactttacaagaagctcactgattctcaatgctgctgacatcagacctatgccaggaraaccagctccttctctgcatgggtagaaatgcccttcttgtgcttagtgagaatgccatcaccacatgctccaaaagaatgctctcaaactcaggattgtgaaagaatcgctaaggggtgggaagctgtgcaattctgattctagaggcttgggatgtgatccagacatcagctccccagtgatcctgagaaatwtgagactagctgatctaaagatagctccccaacctctaaaacaagggcatgaatgagaggggacttgtgttgctcctcagccaccatgtttgaatggcagagctggacggcccagttagcagactttgtttcattcagctggttttgtttctgtgggaaaacttctttcaggcagctggcatggattaccctggcagcactaacctgcagcagactaatcccacaaaagtcctcatccctaacaaaattgccaaaagccctggtcaaggcaaatgtatgaagatctgacatccttagtcattctgtgggtggctctgaccttcaaaacatctcaggaagggcacattggggacaaaggtatcccttgggaaagttatgtccgacaaacagcttgaaccctaaaacatccatcatgacttcgatgtggctcagtctgatgttcaggcccagtagacccaataaatcccttttccagcatctaccctggtgaagacttttcagggacttattatgcaaagctgcctaagcaagacagaatttatattgaacctggccatgatttctgagccgccactgggtgttctgatgacatacacatctcgaggttgaagtcaaggagctgccaaggacaagagactggtggcaggataaaagcagtgtgattccttccagtaaataatggtggggtggcgggggaggtgggaaggggacgctccggggaggaagaggaccgtagcttttcttgtacccaaggtttgcctttcaaatggcatccagacgtgaccaaataaatctctcctctggaggctaaagaatgtgtacaatgcaacaaaagtgaggtggtggagaagcctgctttatctagggtgaatcatacctagaaagaaaacatgcatccgtcacagaaatttcattgattgagaaaatatttttagtttcctggtccacagactgagtccttcctgaaactctcactatgagctgggcactcggatgttgcctcctgagtgtgatcgcctatagaagcagactattgattagagaaaattcttagacaaacagatccccagccctcatctttgccactggaatgcaaagggtgctgccctccccagtaaagggaatatcggtctggtatttaacacggccacaaagaacatgttgttctatagtcaattctctatacagcagcccaagtgatttttttttttttttttgaaacaaggttttgctctgttgcccaggctggattgcagtggtgcagtggaggagtgtagcctccacctcccagattcaagcaatcctcccacctcagcctccagagtagctgggactacagacacacgccaccacacttggctaatttttgtatttttttatagaggcagggttttgccatgttgcccagcctggtctggaactccggggctcaagcagtcagcccgtctcagtctcccaaagacctgggattacaggtgtgatccactataaccagccccagtgatcttttaaaaacagaaatcagggctgggcacggtggcccacgcctgtaatcccagcactttgggaggctgaggtgggtgggtcacgaggtcaggagttcgagatcagcctggccaacacagtgaaatcccgtctctactaaaaatacaaaaattagccaggtgtaatggcggacacctgcagtcccagctacatgggaggctgaggcgggagaatcacttgaacctggaagacagaggttgcagtgagccgagattgcaccactgcactccagcctgggcgacagagcgagactccatctcaaagaaaaaaaaaaagtggaaatcaggccatggcattctctcctactaacacctccaatgtcttctcactgcactcagagcaaaatccaaactccttcccatggctacaggtccccaggctggctgggctcacctttcctgcttcatcctgtcccctgcctccttccccgctgggctccatcctcactgcactcctttctgttcctcttctatactaagggtatctcacctcaggacctttgcatatgccatctcctctacctggcatgacatgcttctcccagatcttcttgtagctgactgctcctctgagatgtcttcttaggttcaccctatctggaagtagcccaccccaccccaaccctgccctaccctttgctatctcatatactttatttttttcataacaccactatcaaagtttttctctttgcctactgatcatctatacacaactaaattgcaagtgccacgagagcagcgtccttgtctcatcagattcccagcccccaacgcaagacttggcacataggaaatgctcgacacatatcactcaacaaaaaaatgaaagctctaggcccacctgcaactgacagcttgaatgataccgaatcctggccttgtagaaggctggaagtcagtgctggcaggagacccccagcacagggaataagaatcacacagctgccaccacctgattcctggccctttctgcccaacacaacataaatgacagcaggtcagtggcacagtccacagtccacactcaaatcttgatcatggccacccacataccccaaacctggagagagactggggtgaggtagataaacgatgccattcaagacatcagacattgctttctatgcccaaaaggcacattccaggcctgatattggcaccggaaactagcagtgccagaagatggtctccaacatacccatcccatgtccctcaaagggcctctctctggactaacctcttctgcatggtctttcctgcagagctgatccgtgtcctcctgcagagccctgggcccacgggtggtgccaggggcagcggcaggatgggggtggggctgcttgacaggaaatcaatgggaactgaaggtcatccggagggcgcagtctccccatcacgcacctgctggcatgggatttgtggtcctgacctcgcttgggggcctctgccctcctgtcagagttggttaaaatcagcctgcagaagcaaatgtcctgcacaccaaatgatctccaggcagcccttctaagggacatccagccaaacaaagaagcactgagtctcatttcacccgccgcaaagttgagagtcaccccaatctctcttggcagcctcctaggaaaactgtctcagacctgccatttttggaggcacatacttgtaaatagaacaaagccagactgaccaagaggctggttatgtccccaaacttaagttgcctggtggtggaggaagtaaaaatacactgggaaccaagatgactgaaactgaaatcttgagtgcaccctagaaatgcctaaatctgccctcaacacctctacatgccaggataacgacaaaggataccaaaacctctgtactgccggagggaaatctcattttcttctcatcccaaaaaatactggggagcttggctgaatctagaatctgattttccttcccccactatacttattttcccaggttcccattctcccttgcttcccagacctttcccctctaccatcttctttcccaattcgtccacctcatcaagagtcatttatcatacaggccaggagcaaagcggtcagcctaagtctccaattcaaaagttgaaaatgggccaggcacaggggctcacgcctgtaatcctaacactttgggaggccaaggtgggaagactgcttgagaccaggagttcaagcaccctggccaacttggtgaaaaaccgtctctactaaaactacaaaaattagccaggcttggtagcaggtgcctgtagttccagctacttaggaggctgaggcaggagaatggcttgaacccagaaggcggaggttgcagtgagctgagatcgcaccattacactccagcctgggcaacaagagcaaaacaccgcctcaaaaaaaaaaaagttgaaaatgaatatggtatgaaaataaagaaaaggccaggcacagcagctcatgcctggaatcccagcactttgggaggccaaggcaggagaatcacttgaggccaggagttgaataccagcctgggcaacatagtgagatccccgtctctacaaaaaaataaaaaataaaaaaatgttttaatgaagaagagacaccctggacatatttacagaaggataacaggatgctggttatagtagcaatagtggcatagctaatatttattgagcatttactatgtgtgccaggcactgttctaagcactttacatgtattatccccatacaacttgtaattgtattattcccatacaactccatgattttatacccaccccctcacacaccccactttacagattggcaaactgaggcacagagagtcttacgtgatttgctaaggatctatgtggccttgttaatacattacagtcttgccagaaccttactcttggccactgcactgtcagcctcttacaagggcgccattaccccctcacaatgagttttgcctccagaactagaataacctgaacacttcctttcttggaggcactagaacacttcctttcttggaggtttctatcagcatcaccaacttgctagctaatcttagctatttcttttctttgtgcctcagtatcccaaactgccaaatagcccagaaataaaccttcttatcacagagccacctctcagtaactcaaaaaaagttaatatggggcttcctgaaaatatgccatcagagaaatacaaaatgtcattatgcagtttagaaaccaaatccatcccaaatgtgagcaaggggcgatggacttgaagaggccctgtggttctgaacatcaactaaggcagaaaaagagaaatgccagaaagtcataaactaaagggtcagattaaagaatcccagaatgttagacactgtctagtctggtgcctggttttattgcaaaggaaatcaataaccaggccaggtgcagtggctcacgcctgtaatgccaacattttgggaagccgaggcgggtggatcacctgaggtcaggagttcgagactagcctggccaacttggtgaaactccatttctactaaaaatacaaaaaattagccaggcatggtggtgcatgcctgtagtcccagctactcaggaggctgaggcaggagaatcgcttaaacccgggaagcggaggttgcagtgagccgagattgtgccattgcactccaacctgggcaacagagcgagactccacctaaaaaaaaaaaagaaaaagaaaatcaataaccacagaggtgaggtgacgtcctcgggacataccgaggcagagctgggatcagatcctcagtccagactcctagttcagggattcctccatcgtttatggcaagggtcaacaaactacagcccctcggccaaacatagcccaggactaatttttgtaaataaagttttatgggaggcaagccatgcccatccgtttacatattgtctgtggcagcttttgtgctgaaatgacagagtcgagtagttccaacagagaccatgtggcctgcaaagcctaaaatatttaccatctggacctttacagaaaaagtttgccgactcctggtttttaacataagccttgaataatgaaaagcctccaccctcagaatacaaaataatagaataggaaacctaagagtcacacagcttaagcagatagttttacaattatctcagcttggtacaacctaataaaaacccataaatacagttaataataaggaaaacaagcactagctcaccctacctatttaataattattgttaactacagcaagcaaaactcatagctgaaaattcgtttgtttgcttttttctagcctcccttgaaagccctgtttcatctaggaaatgctgttggccaatgggcgaaaggacacatcctagaggcgcacagccctaatttcctcctgttgagttgcaggctgctgctgaggcagctgaagacttgagagcattgccctctctccagagcggactcagagagagttgattttctctgtcaaaggcgatggcgccaaaaccctcctgtgcccctcactccagatagaaccctcaggaacagccaggcatggaagagactgtctttatggcttcctctccctactgggcctccatgccctgcttacacccctttcctccccagaaagtgatcaggatatgcacacggcccacagaagcccagcccacagctatgccatcattctatcatcccatggaatagggaaaagcgggtctgcccctgttaggctgatgtgggaatcaagagacctggattccagattggagttggaacttagtcactttgggtttttggcaaatctctcaagccctctgggcccaggtctcccacgtcaaatggagagatcgtcttcacatattccaaatgatggaacacgggcagagccaaattaaggggtggggcaggccaaccacgtggcacccgggctccagtctctaatcacactaagtcattascaggaacatagaaaggtttactagtgtcactcaggcagagaactttgagaaataggacctggctttcatggaatagtccagttcgcatcaaggtcccactgtaatgattattacacttttccctctcaaaagcgcccttgcttggctgataaatgataaagtcaccctactaataagctgtttgtggtgggagtgaggtgagacacgtggcccaaggcacggacagtaatggcaatacatgggcttctaaggaagacaagttcagtttggtcaagaggtggggtgcaggtccggggccagaactgagctgctaaggacaagagaggagaggctgcctctggtggcccggcttctccatttgccatgcacacagcctttgcctcttcttttatttgtcaaatatttagagaatattcgccaaagtgtgagctccccaggaggcccacaggtgctggagagaagagagggctttggagagtactgtaaggtgaaagaaacctaccaacaggtgcctaactgcctggccatgctaagcgcctgagccctgggacagggtatgatcccagcccttcacagtgcctgaccctgacgggcatgcacttggtaagtgttcattctggggacctggaacaagcgaagctcaagccctccttctgttcttggaaaactcctcctccccatggcagctgcatctcgaccaccaatcctactggaccacaggatgcaggaggactacactgtgtcctggatctcgtcattacaagagcaggaggtgagcactgagaaagatccagaagaactcatgcaagcagaggctgtggtctgtggggaggagggccgggcagggcagcggaccagaggaagaagcaacaaagaaggaaggggaagaggaggaggaggaggaggggggccgcagagtcactgtgggtggagggagagcaccgccagcacatgccccacagccatcaatatctcttcggaggacagattatctggggaatttatgctctctaataattaccttgcagagggttccacttatcttaccagaggaatctgccagttgccagacacacaggattctagtcaattccatccacactgccctccccctctgccctcctccccacctccctggctcctgacttctgacctctgaattctaacctttctttgcctctccagtctagggggaggttgatggtggaagggtcacaacaacttttaacagatgtaaaggccaacaaaggggttggtgggttgtcccttatcagtagatatgagagttaacgtcccaaagttgaggccaggcctgaggaagtataggctcttgccaaagacagtgtgtgaagggccaagcaatgctttggggcagactgacwtgattatttttgtcttcacctgatgccatcagacctggttaggattaattttatcttctagtcttcacatccctcctcaaagccttcctatccccastccagccctccagtgaggcctccctccaataatggygtggctacttattcgaaaaccatcacgtgttgctttgggttgctgtggtttctttaaacgcacgttgcagtcctggctgtgagctcctggagaacatgggtactgcatccgtactgaatcaggactacctgagcaacagtaacaacatccagatggccctgacrgtgggcgggacagtgccctccctgcttagaaacaggaaccacatttcatctccacaacaaccctatgaaagagatgctactactacccctcattatacagctgaggacctgggagctcagacagcttcagtcacaggcccacggtcacttggtcagtggccaagtcaggatttgaaccaggtggtcttgtttcagagtctgggctcttaaccactccacaccacgctgcctctgtaggagaggtttgctgactgattcggacattttgtgttgtatctatccgcttatttaagtcatccttttctaaaataataattttttttgagacatggtctcgctctgtcactcaggctgtgcaggagctctgtcactcaggagtgcagtggcatggctcactgcagcctcgatcttcagagctcaagcaattcacctacttagctaccccagtagctaggactacaggcatgtgccaccattcccagctaatttttttttctttttttaagagagatcgtgtctcactttgttgcccaggctggtctcaaactcctggactcaagtgatccacctgcctcagcttcccaaagtgctgctgggattacaggcatgagcctgggtgcacctgggctggtgctcctcctccttaggactccactcactgctccctcctcagggggcctcccccaaactccttagctctggcactcattctttttccatcactctggcacgatgccaactatcaaaaattattttataggctaggtgtgggtggctcatgcctgtaatcccagcactttgggaggccaaggcaggcagattgcttgagcccaggagttcaagaccagcctgggcaacatagtgagacctcttccctacttaaaattaattaattggccaggcacaatggctcatgcctgtaatcctagcactttgggaggccgagatgggaggactgcttgagaccaggaactcgagaccagcctggtcaacaaagcgagaccccatctcttaaaaaataataataaataaaaaataattaattaatgtatatgtttatttactacctgcttttctcaatagatataaaagcttcctgggagaaagactggtctaatttgttcacccctctatcaccagtgcctaaagctggtccctagcatatagtaggcactatataaatatgagttggatgaatgaattgtctgatgtccccactgagcattccataatacatgatggctacttaattggacactttattttatgcaaactcatctatctgttctttatttattagactttacagtgtaccaggcaccttgctgagtaggttaggatttcactgtaccctgatatgaggtagagaatattgtctttatcattctcatgttacagatgaggaaactgagactcagaggttacacagcttgcccaagaccatacagaaatagggtaagacttaacccccattctgtcagtccccctgagtccatgatattaagcattctgcctcattgcctctggctgggtcccctcagtaacatgattctctttacccctgaacctctaaaatgtccccagccttacttctcccccctcaagagccccatcgcctctttctctggcctctgtgtgctggctctcctccattggtccctccagattctctctctgccattcttttccctgctgggtgctgcggaagtctgtcctgtatggtcagccatttgccctcttccctctgctcctggtggtctgggtcaatggcaggtgccgagagagggaagagagacaggggatttcctctccccgccccttcctgctgtggagtgtctgcatctgcccactgaaggtcacagctcctgtgggccagccctcttcatacagctacctctgcaatctggtgaccttccccactcccccgacctagccctaggctgctgcactagccccccaccatgtgagtccctgcccgcagttttgaaactagacatgttactaaacactcctcagtttacttcgtgtggagctgctgctttgctggaaccctgcctctcggacatatgagtgctacatggcctctgcccctcccccaggtcccccaccactgccgctgccccctggtcactgcagctgcctcaccaggcccttctttgctgccagggtttgttctctgtctccaagacctataaataaatgttgatttgctggcttgaaggtttgccctggcagccccaccagggagagcagtgccctggggagcccagcaagcccacagcaagctgtcctcccaagactaggagaaagcagagagcatcgggtccaatgcaggggtcccctatgctcggagcttccccctgtgcggggtgttaagggacccctcagatgatgtcctggtgcctcaaacaaagccgccatcacagcttcaaaatcacaatatcatttgttgagcaactactatgtggcaggttctgggttgccatttgcatacattcactttcatgttaaaagacgagaaaaacaagttcacagaggttaaggaatttaaccaaaacctcaaaactactaagtggatgaactggaattagatcccaggtcagcccaaatctataaggccttaattccccaccagtacatgctgcctcatgaccgatccctttgaatgacaggaggcccacagactcgaacctagtccaggcaggcagctcagagatgccagccacccatggctgggaggagatcaggtggagcaggatgacagttaggataaagggcacagagggctccatgctgcctagagtcactttgtccaaggaccatggcacagtttggccatagtgactgctgagcagccagggggctggaacatgccccccacccccgcccccaaccccgacccactgctccttcctgcagagccagccaggagccatcactcgtccttgggcacacaccagcatttcaagaaaacaagcctgcaagcacagacccctctgagtcaggcccaggactgtcacgaggagactctgaaggggaggggagggacagggtgacacaaagagggggaaggcctcctgccgctggacctggagccgactgtgcttccctaagtcctttctgcagccaaaaggcacattccctgagaacaccgctcaagatccaaaggctttcgctttttattttttaggaagcaatggcaaaaaaagaaaagaaaaaaagaaagaaaagaaaagaaaaagaaatccacatttctagtgttgggagcgattcttggaggcaaacacactctcttgcacacacacaccccacagcgcttcccccacacagcccaaaatagtccacaccatggactcctggagaacccggctcagcacagcctcccgaccttggtccacatgactgctggccagctctcagtccccagggtaacaaagtactccaaggacccgcagtagcagcgcctgctcctacagaccatttcacccctcccagcgaagtcccatctgctgtgtctcgatggagccaggtccagttagcagaggccacttccaatgacccagtgtggcccaaatctccagagctgacctgaacctctctccctcaacccctccaaatcttagattgctgctgctgcttctccaggggaatggctcccacaacattttatagactgcaaggaaaatatccagaactgagaccgttcttcaaaataataatttaaaaaaaaaaaacactgctgaaacacagaactgggtgttatcttaaaatctctgcacaaatagaatttgaatgctctcactccaatcaaaatcattctccgtccctccctttaaacactgaaagttcaattccccctaaagacaggattgcaaacatgattaggtccaattaatttatggagaaactcagaatgaaaggagagaaatcaatagaactgccttgttctgatcactaccgcaaatgaagtaataatttgaaggagatctggaaagaaaggaaaccaaaagtgtcacaccgcagccattggccatttaacaaggcagcattgccccatgtggactggctgggtggagaagaccactcaagcttacaagacactcctggggacagagggaggggagagacagctgaggtcacttgctttctcttcattgtacagcatgaggctcactggtggtaaattctcctctttctcacaaaagcaagacgtaaaagaaagtaaaaggcaaaaagcatccacacaagctgccagtctaataaggacactggtaatctccaggcaggccaaggccatatgggctccccctgcagcttcatgctaagtttatctccatcctcacactctacctccatctctcttccatatccaggaaggaaaaaaggaaattaacaagccggcatccaacatccatcctgaatcaccagctgggccatgtagagcatccaaagatggggtggggaagccccaggggagagagagacattgacagatcaccgtccccacctctcacttgcctgcagctcccttgcatagatgatgctggcaaattcaacgtgattttcattggacctgcccagcagtccagatgtgggagcctaataacaaataacaatgccagctccatgtgatccttgcaccttcaagagaaaatgccttgctggccagctgggttctctggccaccctccagcccaccttgctgcttctggatggaggttcgtgaagctgctcctggcctatccaaatggccagtaaacattaacattcatccagtcaggcaacatccatggagtgcctattccatgccatgctgccccatgtgggaggcagcaaagcgcttcagtgaaaggctggggcactggcatgaggacaccaggtttgagtcccagctccttgcttacttgctgtctgagctgttgaactctgtgagcttcactaccctcagctgcaaaatgggtatgataataagacccttctcatggcttcactgacaagaacaaatgaggtgacctcactatgggtgatcagtaaatattagtggttattaccacaatgtggggtcctaccctccactcattgccaccaccagtgccagaaaaagccagctcatgagttaactcccaggcagtattatccactccaggggcctctctgtccacacagatgagcagaagcagaatgcatgaaaaaataaaatagctcaatgccattgctacagattgccccaccaccaccatctcaccagtcagcttcaagccagcggggtcagcagtcagaagcacagccaagagtgtggggatgattccgtgacaaaccatccccagcagcagaaacctatctcacagcacacatcctcccagaagtgggtcaagggcatccattgcctttgtttaaaggcactgggtcacaaaggaggaggagccttagcaggttggaactttgggatattccacaggacaggtagaagggtgctgtgttggttttctattgctgctgagacaaattactacaaactttgtagtttatgaaaacacaaatgtacgattttacggttctagaggtcagaaatccaaaacgagtcctaaggctaaaaatccaggcatcagcagggctgtattccttttggaagctctaagggagcagtttcttccttgacttttccagtttccagcagctggtggcctcttcctcccatgtgtcacttctacctccacttccaaygtcatatctccagctctgactctgaccgtcctgtctccctcttgcaaggacccttgtgattacactggactcacccacataagccaggataatctcctcayctcaaagtccttaacttaatcacacctgcaaaatccctcataccatgtaaggtaacatattcataggttccaaggattaggacrtggacatctttgggggtaaggtcacgcttctatctaccaaaggcgtgttctgctgctgctgcaaggtacacttgaataccgtcaaagcaatggtgaagaattgaaagaaacgcagttatgtcctaagcccaggaatattgaagctgtcctctttttgacaaaaaaaaaaaaaaaaaaatatatatatatatatatatataaggcagatggtgcctaagagcataggatttggaaccacatcgctctgggttcaaatctaagcttcaccaccagtcccagctgaagctattcaagaccagaagctcatctgtgtgaacttccattttcccaacattgtagggttgatgtatcctaaggaataaagaacaaaatgcacgcagaatctttcacaccatgtctggcacacagtgaatgcttagtaaatggcaactaagaaattgctcggtactgttattctattagtttggttctatcagacccagtcactaaataaaccagtttgacgtgaagtacttggctatcagcaaatactaccaggccctgtcaagtcccaggaatcagaggggctgtttggccaatgcagactgaccctttcatgctgacgtcagggagccccagcagagacaaccaaagatctagagacatgatcaaaatttccctgtcaggacatggtccagaaccatggatctcagtttactttccgcagaaagaagaagaaaaggtgaagcccgcacacttctctcttccacaaactcaggccccattcccttgtacgtctttctcttataaacaattgcactttattttcaattgtgttgtgataaatttgagctatagcttacagtcaacaatttctatcacaaatctttctgccttccaattctgtgtatgtacaaactgaggctaggaccaaaggaacgaagactttatcttacatgaatcatttgattccattactgaaatctctcaggtgaagttaaaatatatatacactgggtctatattagaatatatgagacttgaatttgatctgctaattagctgggtgactttaagaaagtatgtaacttatctgagcatccctttccccatctataaaaggaggcagaggccaggtgcagtggctcatgcctgtaattccagaaggcggaggcaggcagatcacttgagctcaggagtttgagaccagcctggacaacatggcagaaccccatctctaccaaaaatacaaaaaattagccaggcatagtggcatgggcctgtggtcccagctactcaggaggctgaggtggaagaatcacttgagcccgggaggcggaggttacaataagccaagatcatgccactgcactccagcctgggttacagagtgagatttatttatcactaaataaataaataaataaatggagacaggaaaatctgcctcttaagactacagcatgggttaaatagcatgtaaaacctttggcatgttggatttctagagcatgtactatgtctcagacactacaataaacattgtatgtgcattaattcattgaatcctaataacaactctatgaggtgctgtttattattcctattttcctagaaagtagacctcttggggccagggatagtttttttcatcttcaactcccaactcaaataccctgtgagtggtaaatgcaagctacaactatcattgtcgatagttgagtctggaatcaccgcagacgattttataaagatggaccccaagaggtagggaggtttagagaaaaggaggaaggagagtgtgcaggtcttcccaatggggtaaggcgaggcatgaggaagtgacaagaaatgccaagccagtaagaagacaggacgaagcatcgcacctggatagaagactaagtaaaactaccttcctgtggctaaggggtctactaggatacactcattgacttgctttggccaacagaatacagtggaagttagattacaccagttccaagctcaggcctcaagaggccttgcaagcttcccttctgctctccgggaaccctgcctagttgcttagcatatgaatacgcttgggctagcctgctggagaatgagcagacacagaacacaaacaagctatcctagatgaagctattcatctaggacaagctgactgcagacacataggttaaccagcccaaatcagaagaaccagctagctgagcccaaatcgaattgccgacccacggaatagtaagcaaaataaatggttgctatttgaagccattaagctttatggtgttttggtatgctgcaaaactaacagaggcaggagtcaatgtctcattcatctttatatcttcaacagccaataaaagtcctggcatgtaatagttacacagtaaacgcttcatgaataaagtattgaactgatatatcaatacagctgtgaataaataaatgtcatatgctggaaaactgaaatcatgtaagatcgcataattctattgagatacttcagcttaaagaatatttttaaatggggttggctgctacctaattttaaaatccattttcttttttcttcctagccaacatccttttccacaaagtttagtcaaatagaaaagaaagtttcacatgaacatacaacgtaggatgyggtgatcgaaaactagactggttgcttagagatccgagttctagactcaactctcccaataactgggagaccttgctaattctcttaattaccatttctacgtctataaaatagatattaaaaaattacccttccctgtcaacctcacagggttgttgtagcaaataagacagcatgggaaggctctgagcactttttaccgtcaatgattctacttccagccaggctcagtggctcttgcctgtaatcccagcactttgggagtctgaggtgggtggatcacctgaggtcgggagttcaagaccagcctggctaaaacggtgaaaccctgtctccaccaaaaatacaaaagtagttgggtgtggtggcaggcgcctgtaatcccagctactcaggaggctgaggcaggagaattgattgaacccgggaggtggaggttgcagtgagccaggatcgcaccacggcactctagccagggaagacagagctagccttcatctcaaaaaaaaaaaaaaaaaaaaaaaaaaaaagattctacttcctctataagcagaactttactttttgatggtttctagtgtttttataatatatcctcttaagagccccatttatccttttgctgtcttccttttaatattctgtatcccagtagccatattttcaacatacatacatacatacatgtatgaaaccaagataggaaatggttaaaattatccttgatagtggagaaaactattgctcmatccaaagagagctggtatttctggcactgaggattacatgtgaccaaggtcagacatgatacctgcaagatgtatcctctagctccagagttcccatggagaactcggggtccctagttggctgcagcaggggctgccagctgctaaggatgcagccagatccctttccctttccagagacttctgcccagtatgggaagtcagaagctccacactccaagtatggctcttccacaacctcagttcctgccttgggccaagtcttgagatcagtgtagctgagctccgagcccaggtctggcactgctaaatggaaatccttcatcttggcaactccttccayaatggcagaaccaggttggaagttcacaaggtgctccaggcatatcagggcttactgccctctcctaaagctcccgaaacctttggaagtcacagttctggagtaaacatcaggtgtcctcatacccaagcatctcaggagtgtgcaggaggcagcagaaggtagcctgtgtcctgaggcagtgcattctccccatcccatgaatgatggggctggacagaagacatcagggacagcaactcaaaccactgggcaggtggggctgaatggatgggcaacactggccgtgctcagggctctgggtcttccttgacagtgcaattgtaatacctccatccttccatcaacccatcctccctatggtggacataggttgtctgcctgcccagataccattctacctccttctagtaacaatacctccattttctacctctccctcactatcagttgtgtaaaatcaaccccactctaccctccaacttcagagacaggcttgtgactaggcctggccaataagaaaaccggccatgttctagccagccatggtgactcacacctataatcctagcactttgggaggctgaggaaggaggattatttgaggccaggagttcaagaccagcctgggtaacatagtgagaccttgtctctacaaaaattggccaggcatggtgatgcacacctgtagtcccagctactctagaggctgaggtaagaggatcgcttgagcccagtgagccacgattgcaccacagcactccaacctgggcaacagagcaagatcatatatgtatatatatatatatgagaaagagacccacatcccttagtgatccgttcaagagtgatcagttcaagggtgaaaatgtggtctgaggcaggcaaattagagtcaatcctggaacttctgggggaaagaggcactttctttctcttagtatggaaaggcagataacaatatatacctgaagcagctgggagccacccatcaagcaggcctgtttacaaaggatgccaatgtaaagaaaagtggagtttagagatgaaggagagatggagggagtcaagaggaccttgctgagcccctagaccgagtcacgagtgaagaagatacactcacgagctgttagttacatgagcccacacattcctctgtgtgcttaagcactatgagttgagtttcttgccatttgcaaccttaaaaagccctgcctgatgcacatcccaccatttgatgttaccaacagactctaataaggctgaggaagaacccaggggccccatccaaatacctctaggctgcttgaactcaaatgcttttgaaataaggatggttcactgtggctgtcagatgccacacatcaaacctgaaaggaaattctagccagggaatgctacagatggcagctcaccacggcccccaccactccttattgtctttgtcaagcccatttcctcatttactttacctgcctggtccctttaaatacataagtttaccatcccttattagatggataaatagataaatggatggatggatggatggatggatggatggatggatggatggacggacacatggatggatgcatggatgcatggatggatggatggacacatggatgcatggatgcttggatggatggatggatgcatggatggatggatggttgcatggatggatggatgcacagatggatgtatggatgcatggatgcatgcatgcatggatggatggatgtgtgcatgaatgaatgcatgcatgcacagatggatgcatggatgcacagatggatgcatggatggatgcatggatgaacggatgcatggatggatgcatgaatggacggatgcatggaggaatggatggatggatagatgcatgggtggatgcatggatgggtgcatgggtggatgcatgagtggatgcatgggtggatgcagggatggatgcatagatggataggcagacaagcaagcagttatgtagttgcaagttgaacctacacacaaataggcatgatacaactaaagaattaaaacggcagcccactgcagtcagggggccatctgacaatataggaaaggagataactataggcttacttctgtatggttttgggtgtctggaataacgggagatgactctctgggtagcactcaccctgtagttgtgctcctccctctcaagccacagtggttaacaccaccttaccaatagtgcagtacaaagagaagccagtcctggcattcacaggtagctgtgaaaagctggccctaaaaggcagtctcgctcaatccccagcatctacttggatctgggcaggcagccacagaaacagaagaagctacagaggatgcaggcactgggttttggtgtctggacatggaagaattgcaggccaatatccacaaatgtatccgtgaggctctggtcttgaaacaaggatgtgaggaccccaggatggctggtgagggacactaagtggctcaaagaactgagaaaaaaataaaaacatagcagcaatagagaccagagtccgagccaggacaaggcctgtccctcagccacctggctgaaggcatcatcatgacctcaaggaggtaactggtgagtcatacagaaccacactgtgcactcttcaccatggtttatatgctcacagttcaggcaattgcttagaaaactgcatatcgttcatgcccctatgaatcactttcctccttttgttgtctttgtgaagtcatcacaaagttctgagtggaagaattcttccagggactgccaaggagtgacactgtagccaggtgggttcagctctcactttgctcaggatatgggtgtccagtggcgacagatcaggaaaatagccccatactaaatggtgcctggacaaggcccatacacacttggatatgctgtcctgaacacaaggcacaagacacaacacgggaggacctttcatctcatgtctcttacagccagggactgaaggtgtaggacagtaggagaaaatagagtttcacataaaacaccccaaggacatcaaagaaggctagctgccaagaggtaggaagaactagattcttagggacttatccttggggattgataccacccctgccaggcatccacctttggggtgactcagagccaagaaaacaaaggcatgggataagccatggaaaacaaattcctgctgagtagcaaagagagtggcaccaacaagtggcaccatgtgagtgacaagagcaagcaaatgctcacacagggacagctgggtgtgcagggccatcacagctccccctacccccaccacctgaacactacgagacaaatgggactcctggtttctgccctcaacatgcttatatttgagagaggccacaggaccagcgagtgcagagtcatggcgaactgtacacaacctggagtcaggagacccatgttctcaccctgttctgttgcctcgggggccctgaagcccatcgctaagtgtttkgggctccagtttgctcatctgtcaagagagaacccttcacacagctcctaagtgctgtgagtccctgtctctcagactggctaatctccaagggcctgccaggtcccacatgcatgctcttgagagtcacatagatatcaaagctcaaaattagctcctgggagtgggagcaaagcttctgagcccccagcccctcctgtgagcacatacctcaaggcacatgcccccaacagcccagaactgacacatttttgatagttcctgagtacatggatttccagccctggaaatgtttgttttaacttaccaggagaaaagaatttggattcttttttaaatatacacaaagggaatacatttgtatattttcagatacaaagtggatgggaagcaaggctaaagactgttcttttcccttagctcatgtgagtgctattcctcacggtgaattctccaaagaccatgaatggcagagatctttgatctcccttctagcctgtctcgatgtgatagcctggacatgggcagctatcacgccacccttcagaacctcagcacttcaatgaccacatcctgccatcatcacccccatggaggtccagggcccctgccccactgcctacctctccacctgtgcccacctctccacctacccgccccttgtcacattgacagataaaatacaggactcccagttaaatgcaagtgtcagatggagaacaaataatattttagtataacatgtgccttcctaggcagcacaactgaagcaggccccttccaaggatagaaaagtcctcctctcttcctaagtttgtgtccatagaatctcatccagtggcctttctgtcccctggcttcaaatgaaacctgccactgcctctctctcagggtgaagtgtgaagaccgtggcttccaaggccaataggcatggaggtagtcatcccattcagacgccaatggttcttagtcaaaaaagctgcttatggctggagtcaaaaacatgtctaagcgtgactatcagccccagtgcagaagagtctggggagagggagaaacaagaaacagatattaccacaaaacactccaagggaaatctcactacaaaaaaagaggttgttgcctggtgatggctggcaatgggccatgaaaacctagttctgatttttagatacaagacacaagcccaacgtgtcacccagcctggatcccatagaggtcacatggacaaaacagtacttgaagatctttgacctgcctaggtgggcaactggagtggaagctccacaagggtatgaatgctgtcttttgttttcctcatctctatggactagtccatctagtccaggactagcctcagagtgagcatccgatgatcgtaggaagactgaatgaatgcgtgaacacatgaatgaatgcctacattctccaatatgtcccagaaagtgtcaagagctttgtaacgcaaaaggctctgaacaactcaaataagaaacacaaacatgtgcagtgaaagggctaggcctggatggcctgtgaggtcattggcaatgtggtgagcccttgagcctgtcatacacaggcaaataacttcactgaaagaattttaaacgctacctccaacaccctagctcagcatctatggttgaagccaccatgcccagtcatggtgataaccccagaagggaagggtgcagagacgccaagaaacaagaacttggagaggacaatgaggaccaaatgactggggaaataagggatgagtgggtaggaatccaaagaacagaataggaaaaataactcaagatccagcactgctttccaggacacacacacacacacacacacacacacacacacacacacacacgcagacaaagattccccccttccagatccacactgcgtgcctcctgccagccccatcccatcatcctgtgacagtgcttctttgtggaatagaacaataggtacattatgccaacctataattatcctaggagaagcgatggcgaagtcaaggcattatgtgaacactggaatactggataccaccccaccaggagcaaacaacaacaaaaacaacaacaatccacaaaatctctaacgcagataaagactgaaagctgcctaagccagtgccctttcacattcatatgagggtgggattttttccttttcacatgattatttaagcacaaggccttctttcatggaattgatagagtattgggggaaggggctgagaggttgggtttgtttgtgtttttgttttttttcccaataaggaggcagaaagtagaggaggtcgtgagcacgagaaagtgccactgctagggtatgacacatagagccctcaaaggtagttgaatctgattcaactgagtgaaatcatttcattaatagagattccttctcactactcctgtgaaactactttccagggacgttggtataaaataggctgagtcctgggaggtgtcatggaagacagagacaagaaatcagaatatctgaattcttatatcacagccactaactagctgtttccttgatttattcaagaggtatgtgttccctatctgccacatgctaggcatcaagctagcaacagaaggaaaaaacaaagcagtagtcactttcctctcggagcttcagcttcctactgtgtaaaacgagggagtcccacagccctggacacacacacacacacaaacacacagacacacacacacttctaaatacaaggtgcagccccagcctcccacaggacctgcctatacaggccatgactgaagaagggggaaacctgcagcttctaaaactgcacagaaggctgggcacagtggctcacacctgtaatcccagcactttgggagggcgaggtgggcagatcacctgaggtcgggagtttgagaccagcctgaccaacatggagaaaccctgtctctactaaaaatacaaaattagccgggcatggtggcaggtaactgtaatcccagctactcaggaggctgaggtaggagaatcacttgaacccaggaagcagaggttgcggtgatctgagatcacgccattgcactccagcctgggcaacaagagtgaaactctacctccaaaaaaaaaaaaactgcatggaagcccaaacccccagggcaaatggaacagtcacagcatgccatgcacgcacagggtcagagcaagagtatggccaggcgcggtggctcacacctgtaattccagcactttgggaggccgaggtgggcagatcacttcaggtcaggagttcaagaccagcctggccaacaaggtgaaatcccgtctctactaaaaatacaaaaattagttggacattgtaatgggcgcctgtaatctcagctacttgggaggcctgggtattagaatcgcttgaacctgggaggcggaggttgcagtgagttgagattgtgccactgcactctacctgggtgacagagcaagactctgtctcaaaaataaataaataaaataacaaaggtgtgaaaagtaggatgggtgtttcctagcacatctctagtttctgagggctctctctaatggggaccytcctcttgaattgtggtcccatgggttccayctcttctgggatccagtcagggcttcttccttcattctcaggcaccttcagccttgaaactccttggcctcctttcccttcaccttcctggtgaaacataacagagggtcttcgagacaattcctttaaatcatcaaagggcctatctagcaatgtctaactccattccttaacgtttactgaaaagctcctcaaatacatgatcctcccctctacccgttcccctcagctcttagycatccttcctcagatgctactttttcatagggactaatttcttccttcttgccaaatccagtggccacccgtgggtggtcctgctgctcaaccaacgtatgacagtattagccatgcgctccttgaaacactcagagccttgattctactcattcatttagttcctccccaaaagttccctgagcccctgctaggcagtggggatttggcaataagacccagtccttagtcctctgctcatctctccacactccgctcttatggctccaactctcacatcagcaaagggctttcaaagactcaaagcacctccacactcattacctcttgtaataacaaaattcaactctgcaaactttgcaaaacactttatatcgtaatccttttttccccacccscactgggcgaaagaacctattcttgcaaccaacactatcctgaaaatgtggaaaacctctaatggaagtgcaaccaagtgctcctggaattcgacatgcttttttatgtccttcccacccctagttctcccctccctgcccactctcccttcgcacttcgcttgcctaccttacagcagagttcattttgtcggtctcttctaagtggtgggctcctggagggcttccaacggactgatctctttgtagactccatattactcggtgcttaaatatttgttgaaatgcagcaagatcagggagtaattcagcaccaattgtttacctgatcctggaaacctcatctctgccccctccattccccaggagagtctgcccatttgaaaactgttcctgggtttatttctagcatggccctggagagggctgccctaccccgcagggtcagggaggtgagttttctctcaccttgggtactgcagagcccaccaccagtccaccctgaaacctcaaagcaggcccacagggtagatatctagggaccttgaagcaaacatttcacctattcaggacacaaactaaataagcttgtgtcgcttagtaattctgtaatgtcttacttatgcccttgggcaaactccttaaaatatttgtttctgttttcccatcaataaaatgagaattgaagcacctatttcttaggattattgtgaagatttgatgaattaacactaggaaatgtgcctagcactgtttaatatgtggcagaggctcaataaatacattattattattattactattattgacaggttaaaggcctgtgatgatactgactccagcataactctgatactgcccctttgactcggctagttttgacagagggccctttgacaacacctaaaaaacaaaccactaaactttcagtttttaaaaaaataccaggtaagctgggtacagttggctcacgcctgtaatcccagaacttggggaggccaaggctagaggatgataggaggatctcttgaggccagtttttaacaaccaactctccagygaactaatccattcctgccagaacaaatccagtcttacaagagtatgaatattagagctacaaggtaccgccaagagacagggttttgctttgttgaccaagaccagcctggtcaacataggaagaccccatctctacaacaaatttaaaaattagccaggcttggtggcacatacatagtcctagctactcaggaggctgaggcaggaagatcacttgagccctggagttggaggctgcagtgagttatgatcacgccactgcattccagcctgggcgacagagcaagaacctgtctctaaaacaacaacaacaacaacaacaagtaatgtgagaaacaaatgccctccctccctccctgagggtcacccccagcctgacctgatggatgggaaaagataagctcagagatggggtaaggataaggtgggagttaggaatggggtagaggtcagggatggactgagaactaggaaagggaaggatcaaagatggactggaggtctggaagcaggaagagagaaatggagtaagggtcagggctggagaccagcagaaccgaggtgaaatgtaggaccatctgatggatggtcacattaataactttaatttttcaccaccagctcccactacagcatccaaacatcctgctctgaaggagtgggagcagggacagggaagaagaagaaaccttaactgagtgaacattttaaaacaagcaggacatttcgaactcaaatagtaagagtcactttgctgtccaaatcccaccagtccttggtgtaatactacaagtgggacttacaagcaggacccgcaagaaggttctagtaactacctcagcttgcaggacgtaaaatgcctggcgaactttgcattccaaggacaggagtcttccaaattaaaattttaatagtgtgtgaaaatagttcgccatttactcttaggatgaggtagtgtttagaaagtcagcctggaaatccaggccaacattttcagggatgcctcctattctgggaggagaaaaaccagcttgttgcttccctccagtagcacaaagcagcagggaaccggaaagagagaggggtctgaacagcttcttctaccaggaaaccagccaaaggtctccgggcatgtaaggacatctgttttcagaagctatggtttggattttggcattcttaggagtctaggagcaatcctactaatttgggttctagctccaaccatactacctacctgctgtgcgaacccaggcaagtgattttacctctctgagcctctgtttgctcatctggccctctagacaagattaacttggcagtgccttgtagctctaatattcatactctcataagactggatttgttctcacaggaatgaattagttccctggagagttggttgttaaaacaccagggcccccttgggtttccccatcttcacacgtgtctactttccctttgaccttccctgccatgttgtgatgcagaaggaaagccctcgccagaggacagggccatgcccttgaacttctcagcctgcagaaccataagctaaataaatctcttttctttataaatgatccagttcctggtattccattacagcaacacagacagacactcccacatcatcgtcacacagggcttgggctgcctggccctggccactgcctgccaacaccaggcctggtccctccatcatctaggaccttggggaacatggcaccggtgaagggcatgggggttaccagaaagagtgagaagtcggcaggtcagcacggccacacaagccaccctctcccaacttatgtgcaggcatgatggctccccatccaccagcactcctgaggccactacaccagggaggaaagaagtgcatggggaggcctggtcacacctgcccttcctttcagaaccctgcatgtggctgatggcaggtcctcggcgcctggtggaagagaaagggaaggtggcactgggctccacaggcagtgattctcagccctgcttgtcactgggagctggttcctgggtcccaccccaatctcttatgattccatagatcaggaggagacccaagaacccaacttttcacttagctctccagggaataccaatgcaaacggccactgaccaccccttgagcgccctgtggatgagagggtggaactagaggttctagaagcaagtgcttgagtcccctcactagctgaatgactctgggcagtttacatctcctttcaaaccctcaactgcccatctgagaaatggggatataaaagcgtctgcttcttggggttatttagagaaatacatgagaaaaaggatggaaagcacttagcactgtgcctgtacatgttgagaatctataagagaagatcccctcttactattcaggggtgacttgtacaaatgccttcttccatagcaatcccttactaaactggagcatttcatagggaagatgcgaataagggcaatgaagcctcagatacagagggcagcggagtgctgagacacctccgtgccctcccacaacatcccagtgctgtggtccagcaacatacccgccccatccctccaactcagaacatgctcattgatgtgcctgaacccaggctaaatgggagcacacctatagtgggggttcccctgtcagagatatgcactgcaagggcctgcggtccaggacacagaggaaggaagagacgggmggagaatgtgaatcacattcatgccagggtgtgttctaatacgtcagcaaatgtgtaccgascttccgggctgcagaggaaggtgggcgtgtgtggggttagtgacttgaagggaaagaggggcatgaaaaagaagggggtgaagagttagaactggtgcagcagctgggtctcacacacaaatggcatgactctacttcacaggaactactcagaaagggaaaagaataactctaagaaacaaagatctgcctccaaatccaagaatggcagtagaaaatagggtcccccacccagcaagcacccacatcacgtttcatcagaagaactctctattctcagccaggcctggcacactgccttgaccttcccgatcctggagctgggccctgggctcagaagaccccagactgtcattgctggaaacagaatcattgcagatatagttagtcaagatgaagtcacactggaatagagtgagccctaatcttacaggactagtgagttagtccatttgtattactataaaggaatgcctaagacttggtaatttgtaaagaaaagaggtatatttcacagttctgcaggctgtagagcaaccacggtgccggcatctgcttctggtgaggcttcaggaagctacaatcatggcggaaggtgaaaaggagagcaggcgtgtcacatggtgagagcaagaccaaggcagcaagggtgggaagtcccagactttcaaacaaccagatcttgtgtgaactaactgggtgagacttcactcatcaccaagtggacggtgctaagccattcgtgagagatccaccctcatggtctaataatctcccaccaggcctcacctccaacattgggaatcacatttcagcatgagctttgcaggggacaaacattcaaatcatatcaattagtgtccttataaaaaagggaagtttgccccatgaaggaagagattggggtgatgtgcctacaaagcaaggaatgccaaagataagactgccagccaagccccagaagccagcagagaggcctggaacagattcttcctcacagccctcagaaggaaccaaccttgccaacaccttgatcttggacttttagcctccagactatgataaaataaatttctgtgaagttacccagtctgtggcacttacagccaccctaacaaactaatacacccagaaccttactatccttcaccacaccgatcaccaatgaggcaagtcagaaatttccaaaaagtctccacatttatttttctacccaataaaccagacatgatagaggaattcaaatataaacaagacataggccctgccttccagagctcctaggcacacaaatgttagtcactttacactttgcaaaacactttcacatatattgtctcttgtagatccccccatctcacattgagatgggaagggcaagctgtaggttactcccattctgcagatgagaacactgagttttggagagttggtggcttgctccagggcacccagccctggagcggcagagagggagctgcagtaaagtcttgagtccaagacaacattggtgtggctgttttctttcagcctgtcttgctgcctctcctgccgtcttggaacctcttgcctccttcaaacagaagcccctgcactgaggtctcttgtatctaagatctgccccaagtgagctccaggaggcaaggagggaggccagccatgttaaagaccaagttaaagaccaaagtggctgcagcaccatgagataccagtgtagtcccccaccttctctcatagtcccttaccctgaggctgctcccaccagccccgcttacctttttcccatccccacccccggcccccagcctctcccatcccacaggcagggcaggttcctggtaacagcattgcccagtgttgtcaaaatagcgaggagctggaaagaattccagaatgaaatctatgtgcctctgcagcctcccaactgactgccactgtggcagctaaacccgctaatgtgctaagcgttttctggcagggccaggaggcagggttggtattttgggagctgggaggggcttggaggcaacatcctcggcaagtctgggaaggaggtggaggcagggaggcaaagggaaccgacccagaacacttcccatgacgtcaccgagagccacctgagctgcacctcaggattcctgaaacactgctggcggagcggagagtacggagagtacgctgggcccggtgggcagggctcagcagggcatggaggctttgtagctaggcctggggggagagggcgctctagtatgccacttgtcatgtacactttttctgctgacacagagcagtgtgcaatgcgtccgggaggctgggcagcccagggctggcccaagctctgtttgcctgagttggcagtggcagggcccatggtgaccaaacaaaagacgggaagccaaacgcccagaggctggcgggtgaggctccctgagagggctctgaggatacaggcactggcgaagaagggccaggggctcatagggataggaatgggkttgggggcaatgggaacttgcaggcagggtcccctctggtttcccagacacaccgcatcgcctctgggcatcagcctctccacactgtccttgcttttcgggggctccttcgaaaatgcttcaaaccatgacaccaggaaggggagcaaaccaccaaatctgagatccaaacaaggtcccagcattcctttgtccctgatgggctyggctccaaattctgggagaaaccagagggttttgagagagtcaggagaggggttcaggggacaaaaaatagggctggtgaagaattccttccgggagccgtctggtagcagggagtaccgtgggtggcaaggccgtgctgctcaggtgaggggacatggtgtcattctgggaacagatgagccagtaaaaccctgacaggattcaatctggaggaaaaaaatcccagctgataggaactgctgagcgcttgcagcttttaaagcccctctagcaaaaggatctgcaaaagytttgcaaactctgaccacgcagccagtcagccacttcccagcccacagcaacgagagagtttttgctacatcagaacaaacccactcacaaatatctcatcctggcctcccccccggcacccattccttttgggtctgtgtgcctgccttcctcagaaatgacattttgtcagagcagtgagagatagtgttgcaggggccaaaggcagccagggggctggactgcaactaggctcccctgctcactagcggctgaccccaggcagggcacttaacctttatgaatctcattttttaatctgcaaaaatgcaaataatgaagctgctcttacagagttggtgagaggactaaatgagatgatggatgctggggctcgagcacagagatgaggggctccatgacggctggtccccctccttcccaccttcctctccagggccctccggcaccataatcagtgtgggaaggatgcagaacaatgggagtttaattcagaggttggcgaggcaaaggcatactttaatagaattctctctcgcccagtacatggtttcttgtccaccccacccacctttccccatctctaccggctgatagtctctcagctagtagaccttttcttgtttagcagggccactttttttaaaaactccagacgggtaccctccatgttgcaggcgacgtggccctggatcactcaactgactgtcatttgaatggtgcccccagagtgaggcaatggtgcagccctcctaaggcccttcctgagtgtccctccttcatgaagatgattctgaggcttcccaggccttcacccttctttgaaagcccatagcagttcatatgcacttctcttctatgctcaccaaactctgccttcatcatacttgggggatgtgtgtgagagcgagagagagagtccagcagggattagatctgacttttatattctctacagtgcctggcacaatgctaacacatttgatgaggccagaattaccctgataccaaaaccagttaaagacattaccaaaaagaactttttcaatattttaattcttacctcataccctagataaaaattaacttgagcggggtgtggttgctgacacctgtaatcccagcactttgggaggctgaagcagacggatctcttgagaccaggagtttgagaccagcctggccaacaaggtgaaaccccgtctctactaaaaatataaaaattagctggtcatgatggcaggtgcctgtaagcccagctacttgggaggctgaggagaactgcttaaccgggaaggcagatgttgcagtgagccgagatcgcgccactgcactccagcctaggcgacagagcgagactccgtctccaaaaaaaaaaaaaaattaactcgacatggatcgtagagctaaatggaagactaaaactttcaaacttcagaaagaaaacttggaagaaactttttctaaccttgggttaagcaaaaattttcttaaataggacataaaatgcatgagtcgtaaaggaaaaaaattgatacattggacttcaccaacattttaaatgtctactctttgaaaggcactaatatgaaaatgaaaacacaagctacagactgagagaaaatatttgcaaaacatatatctgataaaggatgtttagtcagaatatataaagaactcctaaaactcaataagaagacaaatgactccatttcttttaaggtcaaagaactgaacagacatttcacaaaagaaaagatacagatggccaaaaagcacatcaaaaaaaaaaggttcaacattattagttagcagggaaatgcaattaaaatcacaatgagataccgttaaacatctattataatggctaaaatttaaaaggctgacaatgccaagctctggcaaggatatagaataactacgactcttacacactgcgtgtgggaatgctaactggtacagccactttggaaagcagtttggcaatttcttttaaagttaaatatacaattatattttcatttctcccagagatttgctcaaaagaaataaaaacatatgtctacacaaagacctataaataggaatattcatagcagctttctgcataatggccaaaacttgggaacacccaagtgctcatcagttggtaaatgaataagcaagttgccatgcagccacacagtggaacgcacccatacatgcagtaacatggataagtcttaaacgcatggtatcagttcctattgctactctaacaaattactacaaactcagtagcttaaaacaacacagatttactgtcttacagttctggaggtcagaacgtccgaaatcagtctcactgggccagcatcaaggtcagtttccttatctttttcagctcctagaagccacctgcattccttgacccatggccccttcctccaaagccagttgtgttgcatcttctatctaactgcttaagggaacaggactttatcaaggcacagagccacagcaagtatgggaaacatataagtagttccatatttccagggtgtgtaatgtaacatttcgaagataaggaaactgagattcagagagatccaatatcttacccaaggtccaggacacagtgaaaatcatgttcaaccctaaggcctctgaatccaaatccagagtccacgtgagccctcagacttccctgccttgaccgtggatagtcatctccaccttgtctcagagccctgcactcccacccttgtacactgcaccagcagctaagcctgtggagccaggcagaaccctgggcctccccacctccccaccctgggaccaacagattcccagctccagcaggataacatcataaccttaataagattgacatttgcatcctgttttatattcatcagcattcttacacttacgttatgttatctggccttctccatcgtatgagtctaatggtgcagatattctccaccccacattctccaaccctcagaaagctgaggtactttcttatacagcaagtgggtagaagccaagatcagaaccttacccccaacccaccccttgataccagaagagcctattgactcagaacaaaactcaggcaaaccccccacctagctgagcttcccctccttcatctgcaggatggaaaacagggtaatacctgccctgcctatcctgatacatcaggcataaatggaaaaaaaaaaaaggaagtagtatgtaaaagcactttggaaatgttaaaatgctatgcaaattataaggaactgttctgattatactctcaagaaatgtcacaaattttctccaaaagtgaataattgtcattacttttcaacttcatccccttgaaaagccagtttctcctcctgtcatcttttatttctggttaaagcagagatgttatactcaacattccaactggaatatcaagatcaatctttaattcctccttccagcttcaccctttctgaaatcaagaacaggcaattctctactccacccaccatctcatcctcagtttctcttgccatctgcccccctctgaagctagaaatcaccagcaaccattttcattcctcatccctcyggtctctcctcagtcagagccaacctacatgatgcaaaagcaccactccaatcacctctctcagaggctcacagccccggggggacagcgtccaggggtcctccacgggctgccccagtgaagctctccagcttgtctcccatgactcaccaacccaggtaagcctaaatggccctgtttcccaaaactcaactctcttcccacttttatgtccccactatatctggaactccctttcccactatttaattagctatgggggtaggaagaatcaaactagacccccagctcttacatcaacctaaatatattccaagtgaatcaaagaattgtggttaatggctgggcacggtggctcacacctgtaatcccagcactttaagaggccaaggtgggtggatcacctgaggtcagaggttcgagaccagcctggctgggtaacatggcaaaaccccgtctcaactaaaaaataataataataatacaaaaattagccaggcatggtggcgcaagccggtagtcccagctacttaggaggccaaggcaggagaattgcttgaacccacccagcagatggatgtttcagtgagccaagattgcaccattgcactccagcctgggcaacagagcaagacaccacctcacaacaaaaaccacacacacacaaagaattgaggttaaaaaaaatccagattatatagatgaatatctatctgatagctgaatggggctggaatttctaggctacatagcaatggagtaaatcagaggagaataaaatgaataatagttaacatttacctattttcacttcttttaactggatatccatattttaaaagtaaacataccctttacttcatgttgtacacaaaaaataacaaaatggatcacagaatgaaagaaatgctaaaattagaaaaattccagaagaaggccaagcacggtggcctgtaatcccagcactttgggaggccaaggtgggcagatcacttgaggtcacgggtttgaaaccagcctggccaacatggtgaaacccctattaaaaatacaaaaattagctgggcatggtggtacacacatgtaatcccagctattcaaatggctgaggcacaagaatcccttgaacccaggagtcagaagttgcagtgagcagtgatcgagccactgcactccagcttgggcaacagagcgagactctgcctcaaaaaaaaaaacaaacttccagaagaaaacatggggaaaatcttcataaccttggtgtaggcaaagattcttaggacacagaaaataagaatcacaaaagggaaaaataacctggacttcaaaattaaaaatttctgctcttcaaaagacattgttatgctgggtgtggtggctcatacctgtaatcccagcacactgggagaccaagacgggaggatcatttgagaccaggaattccagaccagcctgggaaacacagaaagaccctatctctacaaagaagtttattaaccaggtgtggtggctcatgcctgccgtcccagctacatcgcaggctgaggcgagaggactgcttgagcccacgagttcgaggttacagtaagctttgatcatgccattgcactccagtgtgggcaacaaagaccttgtctctaaaaagataaaaatttaaaaattaaaaagacattgtttaagataggagatatggttgtacaacaatgggagtataattcacaccactaaatactcaacatgattccaatggcatcttttatgttacgtatattttactacaatttttttaaaagatgttgttaagaggatgaatagacaagccacagattgggagaaatgattcatagtacatatatgtacatagtatagtcatacagtatatagatacatgtatacacagtacatatatagcacatacatgtacatacatacatatatgacaaaggatctatatccagaatatataaagaactctagcaatttagtaataaggcaaacaacacaacaaaagatttgaacagaccctgcacaaaagaagatagccaataagcacgtgaaaatatgctcagcatcatcagtcattagggaaatgcccactaaaactacagtaagctaccgttcacacccattaaaatggctaaaattcaaaagactggtaatgtcacctgctggtgagaatatatagcaaccaaaagcacagccactgctgacgggaatatgcaatggtgcaaccactttagaaaatagtatggtagctgcttattctaaaaacatgcatttaccatatgattgagaagtttcactactaagtatttatccaaaagaaatgggggaaaatggtatgtcaaaaaagagacatacacagatgctcgtggcaactttattcataatagccaaaaactggaaacaacccaaatgtccatcaactggtgaatgattacaatattttggaaaattcatatgatgaaaaactcagcaaaaaaaaagatgttactgcattggtatcaggactgaaaaaaataaaaataaaaattagctgctaatgtacacaacaatgtggataagactttttttttaaaaggccgagtgaaataagctagattcaaaagagtagatagtggtcaggcatggtggctcacatctataatcccagcactttggaaggcctggggcgagtggattgcttgagcccaggagttcaagaccagcctgggcaacatgggaaaaccccatctctactaaaaatacaaaaatttagccaggtgtggtgatatgtacctgtggtcccagctactagggagactgaggtgggaggatcacttgagcccaggaggcaaaggttgcagtgagctgagattgcaccactacactccaacctgggcgacaaagtgagaacttgtcttattaaaaaacaaaaggtagatagtgtatgattgtgtttacatgaactcttagaatcagcaaaattaatctacagttacagagagggggtgagtacaaagaggcactaaggaacttttggggataataataatattctattgtggttacatgggtatacacatttgttaaaattcatagaactatataytttgaatgagtacattttattgaatgtaaattataccatagttttaaaagaactttttaaaagtcaagatgcaaactggggaaaatatttgccacatgtatgacaaattaatattcttaatatacaaaatgtcatgcaaattgatataaaaagcattaagacctcaacaggcaaatggccaaaagacacagaaaagccacaaaagaggaaataagaatatctaataaacaggttaaaattaaagcaatgaaatactgtatttcacaaaccaaatgagcaaatttcacctatcaaatgagtttttttgtttttgttttttgctttgatgataatttttgttttgtttttactttaatgataatactagtattgtaggacaagatgagcactcttctggtaaaaatataaattgatacatttctagaacacaatttggaacactattatataagctttagcaggaacattaaagttaagacccaaaaccttaacaattttcagattatttgacccacttctagaaacctgtgctaaggaataaacaaagatgaatgatcaaaattagagatttacaggcaagagttttcagccaggcactgtggttcacacctataatcccagcactttgggaggtcaagctgggaggatcacttgaggtcaggagttcgagaccagcctgggcaacatgatgaaactccatctctacaaaaaattttaataattagcccaggcacagtggctcactcctgtaatcccagcactttgggaggctgaggcaggcagatgacttgagaccaggagttcaagaccagcctggacaacatgatgaaaccccatctctaccaaaaatacaaaaattagccgagtgtggtggcacatatgtttgtaatcccagctgcttgggaggctgaggcatgaaaatcgcttgaacctgagacgcagaggttgcagtgagctgtgatcacgccactgtactccagcctgggcaacagagtgaaactctatctcaaaaaaaaaaaaaaaaaattagcgggcgtggtggcatgcacactacttgggaggctgaggtgggaggcagagcctgggaggcagagtctgcagtgagctgaggtcacactactgcactccagcttgggcaacagagtaggactgtgtctcaaaacaagaaaaaacaagtctggccatggcggctcagtcctataatcccagcacttaacaaggtagaggcaggaggatagcttaagcccaggagtccaagacctgcctgggcaacatagcaagaccccattctccaccaacaaaagggacaaaaaagaatttttattactgaccttgtttctagcaagaaacaatctaggataagccactaggttgagtaaacgctggcatcaatatgatgaactatcgaatattgtccatggtacaaacttaataaatatttctcaaatatactcaacgtatacactatataagaaccttagaaaggagtgagatgtgtagatgacttacacttatgggtagagaaacacataaacaaattgtttcattgcagcaaatattggaaatcatctaaatgttcatcaagagaggtgaaattaggccgagtgtacttgctcatgcctgtaatcccagagctttgggagaccaaggcaggaggactgcttgaggccaggagttcaagactagactgagtaacatggcgagagctcatctccactaaattttttttttaattagccaggcactgtcgtgtgtacctgtagtcctagctactcagaaggctaaagtcagaggatcacttgagcccaggagttcaaggctgcagtaagctatgacacgccactgcactccagcctgggtgacagagtgagatcttgtattgaaaaaaagaggtgaaattaaataaatcatggtatgtccacacaatgaaatgctatgcatctgttaaaaacaggccagatctaatctatgtcctaggctgggcgcagtggcttgtaatcccagcactttgggaggccaagrtgggtggatcacctgagatcaggagttcaagatcagcctggccaacatggtgaaaccccatctctactaaaaaatacaaaaaaattagctgggcgtggtagcacatgcctgtaatcccagctactcgggaggctgaggtgggaggatcacttgaacctggaagccagtggaggttgtggtgagccaagattgctccactgcattccagcctgggcaacaagagtgaaactccatctcaaaaaaataaaataaaataatctatgtcctagattgttaaaaaatwtttaaaggtgcagaacagggcacttggaatgctactatttgaagggagaaaaaaataaaaggacacataaatatttatgtttatataacatcaccagaaagatacagaagaaaaaacaaaacaggtaagtctatactgaaagactagggtctgaggatgtgaaaacaggggtgacagagacttagatttactttttgctctcaattactttctgtagtgtttaaattttttaccatatacaggtttttctttttcaaaaaaacaccaccaaaaacaaaaacacagatttttttttagaaggaaggggagtgttatggattgagtttcttagaaggaaggagagtattatgagttgagttttttagaaggaaagagagtgttatacgttgcattatatcccctttatatgttgaagtcctaacccccctacaggttgaacatcccaaattcacaaatctgaaatgcaaaatcctccaaaatccaaaactttttgagcatcaacatgactcatgaagatctcacccaatttcccagaagccctcgctcccatcggactagaatcttcttttgagaggcctttccttttctcatccctattgcaaccagtacaaaaagcaaaacagaaagacactaaagcaaaaccaaagttttagtcacaaaaaccaaatgggttggcgagggaaggtggtggttacagggaaggttttaagctcaccaggccctgtagctgaggtttcaaaatggcagctagctggacgccatctggtctaaatctgctcacccaaacctccctccagttctccaagggatgtccctaattactagcacagccagctgccaacatggaatctaggtctcccttctttcaaatattagagatgtgagaccagaaagattacttcccaataccagagaaaaggctacgagggaggaacaagggagagaaggagaccttcactgcagcatgcaaggacatggcggacgcgtcccatcccatatctcagctattatgcattcccaactggcttggccaacatccagagagactccaggctggtgagtctgtgaatgtgaagtagagataagcaaggcggcgagggggagctcgcccactgttatatacgggctgcagcattgcgtggcgaggagtcaggggaatcttccatttccaagacatttctgcactcgatcctgctccccaagactaagaattctttcttggcttcctcccactccctggaatgtaactaagcagttaccttgagaacaaggaaaaattgggggctagggaggtgtatgagtgttttaatgtgttaaaaatcacatttaccctggatacttgtttgcaataaaacagagagtaggaaactccattcttaccttcatctatgggacaggcacccagtggcaatcattgtgagaaatagggagaggctgatctatgcttagggagctcagaaaatgctatgcttccttccagctgtagggaagctgagccactggggaagagtggatgcatttggacaaacaggaatggatggaaggctttctaggagaggggaccacatgagcaaagcctgaagaaggggtggttcttatctagcaatgaggaagtgtgaggagaggcaaagaaatatcttctagaagctgagggatcaggcactggaagcttatctaccttctccaactccagggtaccaccaaggagagcaaaatccagaaacaaggggcacctgcaaagtggtggaggaaagaggaggaaaggaatgtctgccccragcccagccccagggtcagatgccgggaaaaattcctgggattatttggtgctgtatgagatggatctggagccaccctggctccaagagggatgtgggtttggactggggctkccaggactggtctggggcaagctaaggacactttcacgtgtccacacttttgtacttgctgttcaccagtatctcctttccccccttctcctccctgttcatggaaatccttaaaaatcatctcctctgggaagttctcctgatgctctcattcagaattaacccaccattctttatgtcgcttcaacaagttgcttgtatctctttttccatttacgttttctttttctttttttttttttgtttgtttgtttgtttgttttgagacagagtctcactctatcgcccaggctggagtgtaatagcgccatcttggctcactgcaacctctgcctcccgggttcagttcaagccctgctcctcctcagtctcccaagtggctgggattacaggcacctgccatcacccctggctaatttttgtatttttagtagagatggggtttcaccatgttggccaggctggtctcgaactcccgagctcaggtgatccgcctacttcagcctcccaaagtgctgggattacaggcgtgagctaccacgaccagcctacgctttcctatatgcctttttttttattttttgagatggagtctcactctgttgcccaggttggagtgcagtggctcaatcttggctcactgaaacctccacctcccggattcaagcgattctcttgcctcaacctcccaagtagctgagactacaggcgcatgccaccatgcccaactaatttttgtatttttagtaaagatggggtttcaccatgtcggccaggctggtcttgaagtcctgaccttaggtgatccacctgtctcagcctcccaaagttctgggattacaggcatgggccaccgtgcccagcctatgccttgtcttataattagtctccctctcttctaaatgtaaactctcagatgtcaagaactagatcttatacatctttctgaccccatcccccagcaccagctcttccccagagcagacactcagtaaatacttattgaattgaatatacagacccacaaggagcaacctggtactggcggacatttttgattcctgcatccattcattcatttgctcaacaaccatgtgagtgcctaatacctgccaacctggctcacactctctcacagagcacactcaaattgtttcatcaaccagctaaaagtaagttcagtatcaattcagggcttcttttcagttctagaacatagaaaatttcacaggatcacctgaacaccgcagggcgggtgcagcctacatcccattgcctgtttctgtccagatggaaagtcacaccctcaagaaggcccctggggaagacagattgtctgggatgtggatgagggcccccacaggctctgcccagcccagcccagcccagcccagcccagcccacccaggggaaccctagatacacctatcacaggagatggcagttaagataactctatctacatacacagtaccctgtggatactaagtaaggagctggtcatttggaatgaggcaggagagctctaggaagtcctctctgcagagtagatgtggccatggaggtgggaggattaactgaaggtcataagaaaagtctgcccttctcagagatcaataagtgcaaattacttgagagtccaggaactgctctgccatggaggaaaaatacagatgggggcaggggcgggaaaggaagggggcaggttagggacagtcattgatctcggcgggctcttccaagtctaaaattgtaggattctaacctgaacctcccctgccaacaacttgaaagagttgtcttgagatcagggacatgtggagagaaagttgaatagcatgtcagataataaaccaagaagaaattgtgaagtcaaaacaagggataaattttccttatctctctaagacatgcatcaaagcagctgrctgctgtctgcctggcctgggaagatgataatggtttttaatggcccgtaaacaataggaccagcctttgtaataaagtttaaccaattaatcctctaggcttcctccctgcactctgcctactctccgctcctcctttctgtgatggggcaaccttcaggggtctgaaaagcaagggatccagcccctagacgcaaacctataggtgacaataagagttgcccagaggaagtgctaaagaaaattgcctctatcctgatctggctaaaaggaggaagaagccctcttttcagcgaaaaggagaggagagatgatgcatcaaggaatttgcacaagaggtaaacttcattcttattcaggagctcattcattcattcagcaaacattcatgaacacctactatgtgcaaggcatctgcagagggtgcaaaaatatacaaagaaaatacctgcccaagatggaattaaagcctggagggggtggtactgggaacaagacacattcacagatggccgggcgcggtggctcacgcctgtagttccagcactttgggaggcagacgtgggtggatcacgaagtcatgagatcaagaccatcctggcaaagatggtgaaaccccgtctctattaaaaatacaaaaaattagctgggcatggtggcgcgtgcctgtagtcccagctactcgggaggctgaggcaggagaatcgcttgaaactggaaggtggaggttgcagtgagccaagattgtgccactgcactccagcctgggcaacaagagcgaaactccatctcaaaaaaaaaaaaaaaagacacattcacagatatcaatcgtaaaagttagtacaatagcctctgcaaaccactgtataagtccagcttctttttccatttcttctttcatgtgccatgttccgcttggggtggttacgacagacaatattcagaaaatggaagaatcagaaagagaagaaagtggaacacacaagagaaagaaaaccaaggccctcctccctcctgccatggccctctctgtcttcagccctagttctggaaaagaaaagggtgtgttgtcactagaggcctccaggcaggtccatgccactgagtcacatttcaagctgtgtttgcttcctacaccaacaaggcatatcttttctgaattgtgcaatattctggccacctgggtttttctacttggtataccaactcctagtactcaacaaccattccctttactcttttttttttttttttttttttttttttgagacagagtctcactctgcacaatctcggctcactgcaacctccgcctcccaagttcaagcgattctccctgtctcagcctcccaagtagctgggactacaggtgcccaccgccatgcccagctaatttcttttttacttttagtagagacagggcttctccatgttggccaggctggtctcaaactcctgacctcaggtgatctgcctgcctcagcctcccaaagtgctgggattacaggtgtgagccactgcgcctggcccccctttactcttaaatacagtgtgtgccagctgtagtagtttatgcctgtactccgagcatctcaggaggctgaggcaggaggatcacttgagcccaagagctttaggctgtagtaagccaaggtcacaccactgcattctagcctgggcaacagagcaagaccctgactcttaaaaaaaaatacaatgtgtaatggtgatataataattcaaaggttaatcatctctacttttgaaaacaataatgaataccttgctttgcatttgtttagcctcacatttttttcagagttcttcaaaaaatattatctcatgttcatgctacaagcaaccttggatggtaacaaaggttaaacatcattatttccactttaaattttccctcctttctccatttgttttctactcaacaaacagtggttgagtacctgctatgtgctaagcaccatgctgggtacagggtcatgcaacatagcagaaaaacagcagatcctgccttcaacaggttcatagagctatggggaggagaagtgaggacgtggtccctgtctccagggtctggggcatcttctagaggagaagattgagacaagcattaaaagattatcatgggccaggtgtggtgctcacacctataatctcaacactttgggaggccaaggcaagaggatcgcttgagcctgggaggtggaggctgcagtgagccatgatggtgccactgcactgcagcctgggcaacaaagtgagaccatgtcttaaaaaaaaaaaaaaacttaatatgattttaccaggtagaaaagagaggaaaggggattccagagagtgggccagcaatctatgcacagagaagagtgagccatctggggcatccagaccatggggtgaggagcaatgaagggcaaaggctgagaaagactgaagagggaggctgggcccaaacaacggagccaagagtgccttgccaaggagtttggactttatcctgggggcaatgaggaaatcactgaaggttttaagcagaggtgggtgacgtgatcagatttgtgtttcagcaagattaccctggccacgggatggagaaagcactggactgggaagagactgggcagactctagaaacattcccaaaatagaattcgcaggactgggtgtcccactggagataggaggaaaaggagataatagaaacagccttctcacttgggcttgaggggccctcgtccaatataggagaccagtaagaaagccttgcccaaggtcacctcaagttacttgatggctaactcgaatcaagaagctcaagttccttctggtagaaacctcttagtctgcctcattcacattgatcagcaaataaatttaaccatcatctgccaggctttccttgttttccactttatacatgtgcactttttgtcctatggagattattaagatcattagggcaaaattccttttgacctcccataaggcctctcacagtacaagacaatatgtggtcaataaatatttgttattaaatcaaactccaggagccccaagaacccatcaccaggcattgccttacttacaacatgagatatttgccttctttaatccctaataaacagttttttgtttttgagacagagtcttgctctgttgcccaggctggagtgcagtggcacggtctcggctcactgcaacctctgcctcccaggttcaagtgattctcctgcctcagcctcccaagtagctgggattacaggtgcccaccaccacgcccagctaattttttgtatttttagtagagacagggtttcaccatgttggccaagctggtctcaaactcctgaccttgtgatctgcctgcctcagcctcccaaagtgctgggattacagacgtgagccactgcatctggccaacagtattttttatttaattcctagataaagtaattcctagatgcttgaatttcacaatccaagataatttttttttgagacagagtctcgctctgtcacccaggctggagtgcagtggcgtgatctctgctcattgcaacctcacctcccaggttcaagtgattctcctgcctcagcctcccaagtagctgggattacaggcgcctgctaccacacccagctaacttttttgtattttttagtagagatggggtttcaccatgttgaccaggctggtttcaaactcctgatctcaagtgatccgcccacctcggcttcccaaagtgttaggattacaggcgtgagccaccatgcccagccacagtccaagatatttctaacaacaacaacaaaattggagcgttcaatgtggtcttgccaacttttgttttaacaccattgtttcttaaaagaaagaacattgaatacatatccccaaagtcaggataatataattttaagatgaattttccaaattaaatcagagttcctcaacctcagaccaattaacactggactgaagaattctttgctatggcagtggaggggaaggagaagggggagctgtgggcaaaattgcaccagttcagaaccactgaattttttaaagtacgctttcttaaaaatccagttacactgtccttatattttggatcagtgaaaactatcacagactgccaccagtccataaacagcttttgggaacaagagactcagaggtgaagaatgtggaatttgaaatcagacttgaactcaaatcccagttccacctctcctcattccctgaccttgagcaaggcactgttccaagcctccctttcctcccctgcacagcgaggacaataccaccccatcccagttgtggggaggattcaatggaatagatgtgacgcacttagcatgtgaccatcgggaacggaagtatgacattattaacattatttctaccacttctataacatatgtggtatctaatacaaattaatgactgctacccaaatttcagactttctgggtcaaaaggaccttacacataatatagtggactttcaataaacacttaccaaatggacaaatgaaccccttgtcaccccgatctcactagttccttccctgaaacccgacacatctgagtccttttctcctttactaaccctttctccaatcctgctcatgggaattaaagctgtaaaataagcctggcgcacctcgggcctctgccctgggctctgtgggtgggagcactgtggaagccgtatcaatcgcccccacctatgagagcctttcttcagggccagccatgaacgtyccccatgtcatcagcatcttcaggctactgctgtccttcttggatatttaacctggaggcgggccagggacagaaaaaggaggtggcaagatccttgaacaaaaggagctataaaagggcgttgggggaagcaaggcaaacggcagattaaacaagcaggcacctcaaggaaacgtgacgcgggaggggattccgagcctctctgtctgcttacttgacagcaagcaggtcagagttcctgccatttccttctagtagaaaccccaccaagaccacctccccgccttggcaggcaaagcactggtagctctcccaagggaaaaaaaaaacaaaaaacacacactccttgttacaaaccagacacagtcctggacagagcccagctaacaataaatttctggggttcatctcacaagtacattaagtatcttctgacaatctcccaaagggctgggtttttctggccatcacagggctgtagaatattgagtacaaggagagggcttcaagaacaggggatccaagccctcgtttcattgatggggaaactgaggctcagagagggggaaggaacttgttcaggatcatccaagtatgctcccgtcagtrgcagcactgagccaagaactcaaggcttcagttttggcactgggttttgccagaggcttgaaaacataccaagaagtggaaggtgtactatgagctaaatctcacttttcctgaaaatatagatgtgtgctcacacaggcacacatgtgcataaaaggtagggaaagaggaaaacaaatgtagcaaaatgctagtaaatggtgaatctaagcaaaggggatattggtgttcattgctctattttcacaacttttcagaaggcttgccatttttccaagaaaaatctgaggaagggctaggtgtggtggctcatgcctgtaatcccagcactttgggaagccaaggtgggaggatcgcttgaggtcaagaatttgagaccagcctgggcaacataacaagaccccatctcaacaaaaaaattaaaaattgccaggcatggtggctcacacctgtagtcccagctactcagtaggctgaagcaggaggatcgcttgagcccaggagttcgaggctgcaatgagctatgattgcactactgcactctagcctgggcaacagagtaagaccatgtttctttaaaaaaaattaaaattaaaaaataaaaaattttgagggagaaagataaagcactaactagcaatctaagataaaaaatttttttaaaaaaatcacttggaaaagagtaggaattcctccttcaatttcattcagtttccctagctagggactaatatccttagaaaaagttataagaaatccagaggttaaaggggtgggactccaaacaagtaagagatcgccagtattcatagcagtccgcagctacagcaatcttagaatccaaatacgatttcagatattttgtcccatcagctcctaaaatacatatattctggtcacaccatgtatcctctgttgtttttggtgcaaaaagtaaagtaaccatgaactacagatagggcaaatgtcagaatttttccaggggactttatcacctttgcaatacaggtagtttataaatgcaatacaatatagtttaatttctattcaatttgcaaattctttcacatgagtaaatcatttaatcaaaatccacatccaacccacactcaccatgttctctatccatattagtatttggtttgggccatactgggtccataatccagccctgaaaatctatcctgggccacatatataactcataccaatagcagggcactcaaggcatgaagatttgagggaacacaacctatccaagaaacctcaaggaattccttatggctgaagtaaggtctgaggaaaccatgagcaggggaatatgacttggagagaaggtagaggttaaatccaggagggctcatacacccaacaaaggagttggaagtttatccttcagaaaacaaggagtcactgaagggttttaagtaggcagtgatataattggatcattctggcagagtacagatggatgaaagtaactcaaagctaggaagactatcggaatgacaaagacctgaactaaggcagtctgagcgggagtgaactgataacacattaggaagagctattgaccacagcaaatggacaaaactgggtgggaagagggcagatgtgtctgagagagacagaaaggatcccagatgacgtctagcttggccaactaggtagacgatgacaacactcaccctgacggggaatccgggaggaggcgaaggcttggcagaggaacgtggtgagttttgaacgtgttgaggtcctggttggatatacaaatatggagctccagaaagaagcccaggatgaatatgtgcattgggagtaaccaacattaatgtacggggatggatgccaagggtgcagaggaggtcagccagagaattgggggcaaaacaagaactgagtcaaggacagaaactctgggggaaaaaaaaaatttaagggcagtcagggaagaagagaccccaaaaaacgttgaggagtagccaaagaggtaaagacctaggcctgcttttaagtgacccactaaactcctccatctccacaggctggtcacaccatgctggggctggggaaggaataatcatgtgttaaaataaactcatttctcaatgaaaagacaaacagcccaatttaaaaatgggcaaataacaaatagacatttctccacagaaaacatacaaatggccaatagacacatgaaaacataggaagtatcattcggtcattagggaaatgcaaatcaaaaccacaatgaggccgggcatggaagctcacgcctgtaatcccagcactttgggaggtcgaggcaggtggatcacttgaggccaggagttcgaaaccagcctggctaacatggtgaaactccttctctactaaaaatacaaaaattagccaggtgtgctggtgcacgcctgtaatcccagctgctcaagaggctgaggcacgagaattgaacctgggaggagaaggttgccgtgagccgagactgcgccattgcactccagcccgagtgacagagtgagactctgtctcaaaacaaacaaacaaataaacaaaaaacccacaatgaggccaggcatggagtctgacgcctgtaacgccaacactttgggaggccaaggcgggtggattacttgaggtcaggagtttgagaccagcctggccaatatggtgaaatcccatctctactaaaaatacaaaaattagctgggcatggtggcaggcatctgtaatcccagctattcgggaggctgaggcaagagaatcacttgaaccggggaggcagaggttgcagtgagccgagatcgtgccactgtactccagcctgggtaacagagtgagactgtctcaaaaaaaaaaaaaaaaaaaaaatcagataccacttcacacctggtgggatggctagagtcacaaagaggtagaggaactggaccccccatacatcactgattggaacacaaaatgccacagtcactgtggaaaacagcttggcagttcctcaaaacttcaaacacagagttattatatgacccagaaactcctcccctaggtatatacccaaaagaattgaaagcatatgtccacgccaagacttgtacatgaaagtttgtgttagcattcttcataacagccaaaaagcagagataaagcaaatgtccatcaacagatgaataggtaaatcaaatgtggcgtattcatacaagggactattattcagccataaaaaggaagggagtactgaaacatgcaacaacatggctgaacgctgaaaacattatgctgagtgacagaagccagatacaaaggccacatgtgttatatgatttcatctctatggaatatctagaatagggaaatccaaggagacaaaaagcagattagtggttaccaggggtagaggggacaggggagtggggagtgtctgcttcctgagtgcagaatttcttttttctttttctgtcacccaggctggagtgcagtggtatagtctaggctcactgcaaccaccgcctcccgggttcaagcaattctcctgcctcagcgtcctgagtagctgggattacaggtgcacgccaccatgccccgctaatgtttgtatttttagtagagacgggatttcaccgtgttggccaggctggtctcaaacccctgacctcgtgatcctccctcctcggcctcccaaagtgctggaattacaggcatgaggccaccatgccaggccaggatttctttgtagggtgatgaaaatgttccggcatcagatgtggatgatggcggatgtactaaccaccactgaattacgcactttcaaatggttagaatggtgaattttatgttgtgtgaattttctctcaacagaaaaattcaatcatcctttacaaagtgacccacagccacaaggagctggggaagcagtttctccagcttgcagcaggagctccagatattctgagtaaagaagccaaacagcctgcttcccgggagacccttaaatgtcttcacacatccacagctgggggaggagacgctgatgaacaggagaagatggagcatcggcctcccctggctactcactctgtgctcgggccgcctcgcccacttgtaaaaccccaaatgccagggtggcagcaaggcatacatgcaactatgacttgacccgcagcgaggcagcaaccaggtctcacctgggcatagttaccccacaaggacaggaaaggagaaatggtttccaggcccaggacacccagaagccaccaaaaaccaacctcatggttcatcccccttatttgactcttcgacacctaaaacctgtgcgttgtgttcaagatacacccgccggagaccacattcccagacatcccgagggccagccgtcaccacacgggtgcctcggggagatgctggagacacaagtggctttgaaattagcacaacttacatggcctccaggtctgctgtggaaatccaggtccaaagaagaagccagtgaggaacaggaggctgatcattgtgttctcagaaggggttggagcctctggggagggggcactgaggacagagcacggtgttctgcagatcatatcacatctctacttccctctccagtgatatgcttccctcactctcccattttgctccctctctcctgccaaactcccagggcaaccctggataataaagtgaccgaatgtgaatgcttccaggtggcacaccagcactccagagaaactgtcagagcagggggcaaacccctggcctactccagccactggataagcgcaccctcctccatgcctccctgctcctgcctgccctgaagggagaaggagcgcaatgaaactaggtcttcccttggggttctgaccacctcgtggggagattatgattgccctgtggttgccatgcctactgtgatgtcactccttttatcagtctatctggatgaatttttcccccttttctctgaaggaaacctcctacccagtgcttaggagcccattgggagctcccgcccttgtcttatctcgatctgggacctcagaagactccacattcctaacaggactagctctcaggatgaagaaaatctctctcaagctggtcaatctactcctagatttaagcagaaccaaacagaacctatttcaacatcccctctcagaatgcaaacaggagacggctgtgtggaaagatccaatcacctttacttaattggtcagaataaaatcacttttttctttttaaggcagagtttccttctgtggcccacactggagtgcactggcgcaatctcagctcactgcaacctccacctcccaggttcaagcaattctcctgcctcagcctcctgagtagctggaattacaggcgcgcaccaccacacctggctaatttttgtgttttttagtagagacagggtttcaccatgttggccagactggtctcaaattcctgacctcaagtgatccacccgtctcggccacccaaagtgctgggattacaggcatgaaccaccacacctggccagaatcactttttcagtaaaataagtgcaaagaagaatgagggtgggggaaaggtttactgatcccacactttgtcatgcacagaggaaggcaaagaaagaaagaaaactctttcctaaatgatcacttgtctccagcaggtgtatcttgaccattccagccatggatctatagggagtttcatgccaatgaaaagcatttttttggggtcctactatgcatcaggcactgtggcaggtactggagacttagtcccagcccttaaagaactaataataggatcatggccaggcgtggtggctcacgcctgtaatcccagcactttgggaagccgaggcgggtggatcatcagaggtcaggagttcgagaccagcctggccaacatggtgaaaccccatctctactaaaaatacaaaaattagctgggcgcagtggcagtcacctgtaatcccagctacttgggaggctgaggcagaagaatcgcttgaacctgggaggcagaggttgcagtgagccaagattgtgccattgcactccagcctgggagacagagcaagactccatctcgaaaaaataaaaaaagaaaagaaagaaaaaaaagatcactgttcacaatcacaacatttacacagcctccttcaaaagaatttcttctctagaaagataagctgagagaccagacagttcgtctgcggccttcatgaagtgaaaggaggcagagaagaaaggagttggccatggacaggttttgccccagatccttgagtgaagaccccagcctgctgcaagctttttcctcattctgtcctcccctcctggaatctgtggcagcttccacaggcggtgaaagaaggcagcaagcagtggctccagtgccagctgcagcaaccacaccaggggaatggggccatctgacacagagagggtgtgagggccagggagactgtccctgtagccagctaacccctccagtcaagtcgactttcacaaaatgggcctgctcctggaagtcattgatgccattgttaaaacacagcaccaggccgggcacggtggctcacgcctgtaattccagcactctgggaggccgagacgggcagatcacttgaggtcaggagttcgagaccagcctggccaacatggtgaaactttgtctctactaaaaatacaaaaattagctgggcgtggtggtgcacacctgtaatctcagctgttcagaaggctgaggcaggagaatcacttaaacccaggaggcggaggttgccatgagtcgagatcgagccactgcactcctgcctgggcaacagagtgagaccctgtctccaaaaaacagcaccctggagaagacagcagtccattcacactggaaacatccagacttattacataaaaatggcaattagtggccaggcacagtaactcacgcctgtaatcccagcactttgggaggccgaggtggcggtgtaatcccagctactcgggaggctgaggcaggagaatcgcttgaacccaggaggtgaaggttgcagtgagctgaaatcacaccactgcacttcatcctggatgacagaacgagactccgtctcaaaaaaaaaaaaggcaattactgttggcatcagcagcacagttgttttcagccaaaacttaagacacagaactagccttatctttccagtatatggtatgtctcttgctattttttgcaaattatctatcatatatattatcatatatattctttttttttttttttttttttttttttttttggagacagaatctcgctgttgcccaggctggagttcagtggcatgatctcggctcactgcaaactctgcctcccgggctcaagcaatttttgcacctcagtcccctgagtagctgggattacaggagcacgccaccacacccagctaatttttgtatttttagtagagacggggcttcgccatgttggccaggctggtctcaaactcttggcctcaagtgatccatctgcctcagcctcccaaagagctgggattacaggtgtgagccaccgcatctggccatatatattcttttaatggcaagcgggaacaaaatcgtattcccattttctgaatgagaaaaccaagcctaaaagagggactcccaagtaatatcaacttgcaaacctatgaatttttatcttaaatactggctttgagggacctttggcaacagcaaaggcattcggcaatttgtgtggaagtcacattaccagcccaccgaataagccacaactatgagttcttccgtgattagcggggctggggatgtggcaggcaggcgtggaagtgagatccacgtgaaagacctaagcactgactccccgagggactggcgaaatgacgcaggggccagatagatgtcagatttggccaaagtgtcctcctttctcacaagcccgtctgcctttcacctgtcctgaggtaggacaaccggatgccctactttgctgtgcagccccactctcttggggacagtagcccaaacaggctgctcttgctacacacagataagaagctttgccacccaaaaccaagaaaggggccggtgaggacacacagggaatgctcactcagtggtggctgagtttgtggaagtagcaaaacctgcactgtaggacccacacctgtgagagagggccccacgggaatctcagcttggatcaaagcaggcgggtgctcactccactgagggcagcagagcccagctccaggtgcgatcaggaagtgacctgagaagctggagttctggactcacagacccaggcttgaatttcagcaccactcagtcactgtgtggtcttgagtgacttgcccttgtttttcctcatccataaaatagggataaaaatacctgaccttgaaaaattatacgaatgccagcacacagtacatacgcacagcagagacaggagctagaattattgatttgccaaatgcagcagtgtctggactcagccgcccacttctgaccaatggccttcacttgtaacacagctgatctggagggtaaagcctgcagccgtggaaccaagctctcgccaaggtaactgacccatgtggggctcagagccttgttcttactagaaccactctagtttgtttgattttttttatttatttatacacataattctgtgcattcctttatgcatatgtatacatatatatgcatatgtataatttattcaaatagcatcatatcactgatactattctcctacgccctaccctcccacatggctactcacagcccctgcctttccaggcggcccgtgttaacatcttagtttgtatccttccacaattctccccatattcatgtaattttacacacacacacactgaatagtgaagttttggacagtgtgggggcgttattgtttaacaaaaatggaattatacatcatacacagtctctccctctttttttattctaccataatttgccaaaatccttttaatggttctgttataattcatgatataaaggtgtcaaagctattcagccattcctctactgatgggaattcactcagtttcaacttttggccactaccaacaaaaaagcaataaattccttgacagtatgtcctaaccaaagaccattttccaaccagacaaaaggccaggtcccaggatgtgagggtcacccatgaaaaggacctcatgatgaactcctgattcagccacatcatccttaaaattctccttagaagagagaccctctgctcctagaaatacaaattcccaggcatgggtctggcttccaaactctagctcctccagttcttactgcatcaagtcaattctgcaggtcttcattttcccatctgtaaaataaaatcataactgccttaggcggcaggatttgagagtgctttagcaagggatttttatgagggagcagtgtgtgaaataatatttttgctgtaattctgtgagatgttgtttctagcttgtttgggggtcagggaagggagggcaaaacagaactaacagattcaattaagttccctctgagactcaaggtccctatttataaggtacctggggctggatgggaaggcacttctatcttctgcatttctgaaacacctggtactgtggttgtttacaaggaaaacttaggaactggacaggggagctttggagtgtctacttgcccagttttgtcagattccaaagaggggcaactataattgaaattataagaagaatggtccaatcagcaaattttggaaaatctgtaatctcactggtgtttgattttcactcaaaaattccctaagctctacatttcattcagtaaaaagttggggttaggggagagatggagaacttcttttgcaggggtatagtgatttatttggtctattcttgaaaaaaaatgagaaattttgggaaaacaatcttaaaatttccatttcgagtagcagttctaaaagactttcaagagcctctctgaaaagaagcagttacagcaacttgaatgaatttacctggttatcatatggctcacatgcatgagagtgggggagaagacacggtaaaatcaacagagttcgtgtcatgatattctgctttaaaacccaaatcaaggccaggcacagtggcttatgcctataatcccagcactttgggaggccaagataggatgactgcttgaggctgggagtttgagaccagcctggaaaatatcatgagactcctctctctacaaaagaaatttttttgtaattagctgggtgtggtggtacacctgtaatcctagctattcaggaggctgaggtaggaggatcgcttgagcccaggaggtcaagcctgcaaggagctatgattataccactgcactccagcctggatgacagagtgagaccctgtctctaagaaaaaaaaaaaaaaaacctcaaaacctgactatagaagaattttcttcatcaaaatcgaatcaagcagataattggcacccctttggaaaaggattcagcagcctctactgaacatacgcctgccccatgacccagtaactcccctgcaaggtgtatatacttaaggtctccaaaagacaagtaccagcatgttcccagcaccactactcatggaagacccagaccaaaaactaccacatgctcatcaaaagtaaaatgggaaaataaatcatggtgaatttacataacagagcactatatagcgatgagaatgaatgatctacaaccacagccaacgctgggtgaatctcacaaacgcaatgttaaaggggaaatccagctagtaaagtgaacgtgctagaagattccgttcgatggggttagactcagaatagtcacccttggtgggatggggtagggagcgttggggtgcctggaaggggcacggctaggcttctgtgatgtttcttcatctgggggtttgtgacacaagcatgctcaacttgtgaattttgggtggtgaacatatgtgcactttttggtatgtatgttatacttcagtttttaaaacttaagaaattagccaatgaacaaaaataaacatgattgtgagctgggcatggtggctcacactggtaatcccagcactttgggaggccgaggcaggcggatcacgaggtcaggagtttaagaccagcctggccaacatggcgaaaccctgtctctactaaaaatataaaaaattagccaggcgtggtggcagacgcttgttatcccagctactcaggaggctgaggcaagagaatcacttgaacccaggaggcagaggttgcagtgagccgagatcataccactgcactccaacccgggtgacagtgtgagactccatctcaaaaaaataaataaataaataaacatgattaaggataaagcaatccagyggacaaggctcttggagccatattttatttgkcatgtatcattccggggagctctcctctgtcaatgccaagactagctagtcgagtgtggagaaaaggcattctgtgagaacagatgaaagggaacagagaaactggcactttctttggaaaagagttgtttccaaaacctagatgtgcagcctctaccccaggtaattagtccaacacactatccattacagctgagtccgggtttgcttcaaaagcatcgggggttttttgggttttgcttcccttaaaaaaaaacttgttttgaatgaggggaaaaaggcgtagttaatttttatacagaaatctgttaaagagatctgatcaatggtgacaaaatggaagccagagatggaaaagattcactgtgaggctctggcactgaaggccaacttgggcttccattcagttcaataataatatttatcatagctgctaacaatttttttctcttttttgagatggagtttcactctggttgcccaggctggagtgcaatggcgtgacctcggctcactgcaacctccacctcccgagttcaagtgattctccggcctcagcctcctgagtagctgggattacaggcatgtgccaccatgcccagctaattttttatttttagtagagatggggtttctccatgttggtcaggctggtctcaaactcccaacctcaggtgatccacccgcctcagcctcccaaagtgctgggattacaggcgtgagccaccacacccagccaatagctgctaagacttacgcaggtttacatatgctaggcattgctctctgagcttatatatattaactcattccatctctatctatgaggttgggattgatataatccccactttacacccagagagggtaataacttgcccaaagtcacacagctaataagtgacaaagctaggcagtttggctagagtctgtgctcttaacaattataccatattgtttcctagtaagcatttcttatgcccgtactatgtgctgggcaccatgctggacaaaaggagtactgagatatataaaacacgggtacacacataacaggttctagtccatgcaatgatgagaatcatacaggcattctgaggtctaatttcagaacaaaacgttagaaaactgcctccacacatctggacattaagactaaaatgcagtgcctgttttctcattggtattattctattcaatagagtcaattttaagactaagcattccttgacaccccacccatccttgggtcatgaaactcaataaagctctcttcattttgattggaggggggaaaattccccgtaaatatgtttgcttctttttcctgaatcaccctcttgtgtgaaaaggattgcttaccactgatctaacagggtcttgaatacagggtccctcagagggtacaagaagcccaggtgttcaggttattaaaaaatgaagaaatgcaaagcaggattacaacatttttggcacattatagatcctcacacaacaaatttacattttcacacacactcacgcacaaacacacatacaaagtcaaatacacaatgtaaaataattatgatcacaagaggatgataggctctacatttttaaatattgactcagaatgccctgggaatgacgtggtcaaggcacagactgtgcatttgacactttgtgatgaacatcttggtgcacatataatctagtgcacagataatgtcaaagtctcattagaatcctccatggaaccaggtatggtggctcatacctgtaaatcccagtagtttgggaggtcaaggccagacgatcacaaccaggagttcaagaccagcctgggcaacatagtgagtccctgactctacaacaaatttaaaaattagccaggcgtggtggcacccgtctgtagtttcagctacttgaggatcacttgagcccaggaattggaggctgcagtgagctataatcgtgccactgcactccagcctgggtgacagagaaagaccttgtctctaaaaagaagcctccaggaatgggaaacccaagttaaatcagctcccactccaccctaactcccttcctaagccttccttaagggaaaaagaacaaaatactgagcccagtagtaaggaaagaacagtgaaagccccagttaggaaaccatgaaagagaagaaatgaggtacacagggagaaaacgtggatgaaaaccctagactatggccaccaacagacccaagctagccaggtgtagacctctgtgacacctagaggtcaagtccaagaggtcagctgaagttacgaaaggcaggcaggaactcaatcagctacctacttgtccacgagctagccctccccaggcctggcatctatgcttacctcctggcccactcctgctggcctctccacaggcacaggtgaggccctaaacaccaggaatcttctaatgtgtgctgccttctcccacgtctgtcccatttcctaggagttaatcatggtgcccattgcaacatggcacccaatgccactttccagagtagtgtgacgtccaattccaagacctggaggataaaaggtattaaagctcctgggaccacagaagagacagggcagaaagctggtggaaaaccatctccaacatctgtttctttttctgttaaaatctatccactgtgtgaattgccaaggaaagttaagattcctgttctgaaacgagaagggttctcttttcacatgacacctgcagaagatgggaaacatgataccccctgcagatcagaggacaccggctccctgtaagaggataccccaacccttgtcagtgcagcacccggcagggcgatttttacatttttctcctcttgctgaagggcctccagaaaggccaccagggctttccccaagagtaaaattctccccagctccctaggaggtctcactgcccaccacccctttatttagctaagtagcagagtttttattttactgtttattttattttattttattttattttattttattttattttattttatttgagacagtctccttctgtcacccaggccggaatacaatggcatgatctcagctcactgcaacctctacctcctgtgctcgagcaattctcatgtctcagcctcccgagtagctgggattacaggcacgtgccaccacacccagctaatttttatatttttagtagagatggggtttcaccatgttggccaggctagtctttttttttttttttttttttttttgagacggagtctcactctgtcgcccaggctggagtgcagtggtgcgatctcggctcactgcaagctccgcctcctgggttcacgccattctcctgccacagcctttggagtagctgggactacaggcgcccgccaccacgcccggctaatttttttgtatttttagtagagacgaggtttcaccatgttagccaggatggtctcaatctcctgaccttgtgatctgcccacctcggcctcccaaagtgctgggattacaggcgtgagccaccacgcccagcctaggatagtcttgaactcctggcctcgagtaatctgcctgcctcagcctcccaaagtgctgggattatgagccactgcacccagccagtagcagagtttttaaataacttccagagccctttactggagacacacccaagaagatgggctcttattcttcccacagaggactatagaccatcaactaaattcactggctcctactcaagctatagaaagctgaggaggaccttggaacatcctctctaaattcctcccctagttccagtccaggtaaacaaaaattgattctattttttcaaaacaccagccccttcagatggcctggttaatcttcattaacatgttatcttcattaacatgtttatcttcattaacatatttctcagtgataagaagggcccagggttcaacatcccactttgcatccatgcagacaagggctgtgggaagctgtaaaactgaagaggcggtgaatccaggagggattccccagatatccgtgagttggtgtttgactttcttgaacacgtctttcctttactttacacttacacttactgagcattcactctggaccagaccgcgtcctaagagcttcacgtgtgtggtcattcaatcctcaaaccaatcctatggggtaggtactggagttaagtgatggcgctgggattttaacccagaagtctgattgcaaagcccaacttaccatgagggccacgacatatgtctctacttacggattccaccagtactcttgacaggagcatttacctcactatattataagccttgatctacttttctatctccctgaagcataatcagccataatctgctaaccgtgcctcagttttcattctcctttctatttttttttcagcgggggcaggggagacagaatcttgctctgtcacccaggctggagtgcagtggctcaatctgggctcactacaacctccgcctcccaggtttaagtgattctcccacctcagcctcccgagtagctgggattacaggcacgtaccaccatgcccagctaatttttgtatttttagtagagacgggctttcaccatgttggccaagctagtcttaaactcctgacctcaggtgatccacccgcctcagcctcccaaagtgctgggattaaaggtgtgagccaccgcccagcctcattctcctttctttatttttatgatagcctctaccttgagtttcacccaagcctatggccatctgctccaaactacatttcccaacatcccttgtggccaggtgtggccatgggcctaagctaagccaatgggatatgagtggaagctccttaatgacaagctacttgcctttggatttcacctcctgcttctcacatcctgaaatacagacttaaggatacaaaatagactaaaacctgggtccatgaatgatgactttctggacctaccttacctgcctggtgtgctcgccaaacgacttatttgacaaataaataaacttctgtcttatttagcttttttaattttttttatttttttttggacacagagtctcgctctgtcgcccaggctggagtgcaagtgcaatggcgcgatctcggctcactgcaacctctgcctcctgggttcaagcgattctcctgcctcagcttcccaagtagctgggattacaagcatgcaccaccatgcccggctaatttttgtatttttaagtagagacagggtttcactatgttgcccaggctggcctcaaattcctggcttcatgtgatccgcccgccttggcctcccaaagtgctgagattataggcatgagccactgtacctagacttatgtagccattctatttggggacctctttgttatagcagcttagcctgtatgctggattcagcacctgaagtcccacagcttgtcttattctattcaacatctccagaaccctttcttagggcttggaacatagtagttgctcagtaaatatttgttagctgaatgaaaacaccattatgtaaagcaggtagtaccagggctaaacaaactgatttactcaagctgtgcaggtgtcccgtatccaggtgactacaatgtttcctgctttcctggaaaacaggagttcaggacagagagagtaggtttaggaaagcatttgcaataggaaaggggtaagctttcactgcatctgttgttggctctctgctgagacaacagattttgggcttaatcaaaagttagctgaggttacttcttgtctgataaaaataatgggctccatttgagcacttactgtgtgccaggttctgtactaagcgcttcacatacattatggcattcattttcattcaattctcacaataaccctacaaggtagaaaatattaatatctccagatgaacaaaccaggcccccaaaaaagttaaataacttgccctagctgcatggctcgttagtgacaaaagtaaaattcaaacccaagttgtttgagcctaaacttactctcttcataaccaatctgccactctgcttctcttcctgtgtgacaagccaatattccccactatggttataagtttcaagggctggaccacgttttgtgcttatctcaatagacgccacaggcacggagcttccactggtggctgtgacacttcttctctgtgcatgattggtgaggggttgcacacacccaccaggagacatgacggcagagggcaaacactctgagacccagggtccacccagctctcttttgccctctcctctccctgggctgccccggctgcctccttgacctctgcactcttctgcccacgctgctgccgcccacatcttggacagcatcccccggggccgccttcctgcctgtctttgtgtacaattcctgccaggcccggcagttctcctagctaaagccggcaaggtccagacctgcccgtctggcctggtaatggtgtggtccacatttcacctcccaccttcaccctaacttcatcctcatggccattctttatccacaacaactccttcctccccattccctagactcagcaaagcagtcaggagctaggcaaggtggcctttatcccagaggttgggataaacctagggctcataaatctagggctgtgagccaaatacggcccctgggattgctttctggttgtgcactatgctttttgaaaactgagttagctaggtttaggctgggcacagtggctcatgcctgtaatctcagcaatttgggaggccaacctgggtggatcacctgaggtcaggagttcaagaccagcctgaccaacatggtgaaaccacatctttacttaaaaaatacaaaattagccaggcatggtgtcatatgcctgtaatcccagctccttgggaggctgaggctgaagaatcgcttgaacccaggaggtggaggttgcagtgagccgagatcataccactgcactcctgcctaggcgacagagagaaactccatctaaaaaaaaaattagctaggtttaaagtcattagaggtcatataaaaatgcaaatttcaaacttctctcagaaaatcaggagccgtgacaacactgggctcacctccccatgtggcaaatggcttgggttgaatgtgaacatcctccctggaagggcataaacttcccagttgaccacagtacagtcccccaacccccacctcccaccaactccctattcttcgtctcctacaggtttacatggcctgactagcccccagaggcattggagtttgacacgcccacagcagtgcctccattttgccgatgagcaaactgagaaaaggcaaagagaaattagtcccccagatctccaagtgagttcatcagcaaatccagggctggcaatcattagacaatatttatccagctcccagatgtccccgcccctgctctgttcagtcactgcactcatccatgtggctgccccaatgccttgggcatgccagagagacacctcattctttcaacacacaggtcacaaacatcttttgtgccatgacaatctgattctcctcacgtcaccccaagattaactcttttcaaatctgtggttcagattatacaccctgaagctgctgaggggtgacctctcaataaggctaatctcccctggacctaaatactggtggggcgtgtgtgcatgtgtgcatgtgtgtgtgtgtgcgcacgcgcatgtgtgtacccatgtgaactcgctcatgcatgtgcttctagattaacactctttcttctcattaacttcccagacaggtgagaagtcaacatttgccccagttagagaaccagaaagtatcagtcccactgccccatctaaaggggcagcagctgctgatggttgccatagtggaatgaagattcagggttgccagatctttcaacttttcaagaagccaggaatataacttagaagaggggagcaatggtctctaaagacctgtgctgagaaacaagttcctaagtgcttgggagaatttatgaggaccaggtgctagagaatgccgggaaatgaacgctcccctttgaacgtcccattggtgaggtcagaactatgtcctcaatccctcatcagcctatcccaggactctgaagaggaccccagggtgcttggctggctttgccttccagcctaagaatgtctttgactaatatttttcttaatccctgtttgctctgtcctcaaaacaagcctttttctctttttcttatccatcttctccatagagccctcaggttcttaactcacacggcactatctggatctttccagtaagtaggttgccgtttccatttctttgattaaacaactctaacaaagaattcattgagatgaaaatgcttatcatgaagcaggtaacatccttttcctccccaaaccacaagcaattaacatataaatggcctggcaaagggacttctttgagaggtggcagattataactactcttgctcctacacggataaagcttttttttaaagacaggaaagaacaatttacaaatgagaaaatgtcacagatggccacaaactaacttcccgagggatgagtattttgatgcagatacttcttcaagtgaaaaatgtacaatgtacaaaatgtccactcgaggatctgttcctccccgtgtgggtaatcgccctcctaccacgggcaacgggtaggcaaccgatatgcccagaaaggcggccaatgggaggacagctcgcccagcctcccgattggccaggcccgccaccagctggaaccatggcgagctttgaggacagcagagccacttgatgggattctctctctcttcaaagcatagagcaaacatcaattaatcctcaaaagacgctttcaagaagaacattatcccttttggagacgcagaagctaagaggtgccgcaggtaggtgaagggaaggcaggaagttgaagaggagaggagaaagtggagcaccgggctttcagccccagttctggttctcctgagagagtcaagttgcaggagaagaatgaacctgcagaagccgggcagggagaggtggtggagaagccgctgctcttgggtgcgcccctcaaggcttcccactgccccatcccctaggagaccacggagtgaaaaaagttggaggcctaagtacagccgtgtgtacccagccgggcaccagagttaagacaactggacttgtgctcaaaaacccttctttagtaaaacaacccgtaggagtctgtgggaggaggaaaaattgaagtctggatgcaatttgccacactgagtctgttctggtaaccgcccccaacacactcacacccccttgcctgaaatggggagaggggtgggatcggtgtgtgtaaacagaggcactgccctgcctggctgctctttccatcttaggagaaccaatccagaactttctacggctcacactctgatcacagcctgtcgccatgattggcaataaacgtcacacattctcacgttatacatttattcgacctttaatattgtgctctgagattcctggaaaacttgtatgtcattggtcaaacgttataaaaacagcccactattttttccccactcacatcgtccgtgttgactgccttacacaccgatttctacatggaatgtttttagcctgcattttaacacttagaataactttctttgccacacactacatacatactgtttgcatcaataaacagagcccgtgccacatgcaagttataggtttattggagacatttaagtgtttatagaaaggacttttctaaagaatctgaatgggagttctctcaatttaccaatagtcaaagaaataaagaaaattaccctacagctgatttttttttaattaaactaccaacaactattctgccatagccttgcgtgtgtgtgtgtgtatgtgtgtgtgtgtgtatgcatgcttgctgaggcatagaaaatatctggaaggatttacaaaaactccttagctttggggaacagaatggacagacagagagaaaacctctttttttcttgttttatgttctttactgtgcattgtttacaatcagcatgttgttgtttttttttttaagactagtcaagagcagcagtgagaaagggggaaggaaagaacaaggagttcaatctgtaactgtgaacaatcaattgagataactcactaccctcagactagccaccatgttgctttttaaatgtttcaaatcacaaaatgaaaaagttactctaagatcatctattttttccccaggtgtggtattttgtccccatgcctgtgcaaagtaagccagtagaatttagaaatagcttgctgcctttttttttttttttttttttttgagatagaagcttgctctattaaccaggctgcagtgcagtggcacgatcttggctcaacacaacctctgcctcccagattcaagtgattctcctgcctcagcctcccaagtagctggtactacaggcgcggaccaccatgcctggctaatttttagtagagacggggtttcactatgttggccaggatggtctcaaactcctgaccttgtgatctgcctgccttaggctcccaaagacctgggattacaggcatgagccaccatgcccggcctgctaccttttttacatacacaaaataattgcaaactttcactgcagtactgccaaccctcatgtcaccatctacaatgtaccacgtcaagaaaggacaatatcttcaaacccacttaccagaagaaaaggttgaagctgtatttggcaggatactgacatacaaacctccaagatctgggaaacaactcaggctccttgacttgacttccttaacgatgacttgagaaacaccagaaagtccagaacacataaactcatgaaaccaaccaatagactggaatctctcctgttattaaagtcatctttttggccaggcgcagtgcctcacacctgtaatcccagcactttgggaggccaagatgggcggatcacttggggtcaggagttcgagaccagcctggccaacatggtgaaaccctgtctctactaaaaatacaaaaattagccaggcaaggtagtgcatgctatagtcccagctactcttgaggctgaggcaggagaattgcttgaacccgggaggtggaggttgcagtgagccgagatcacactctactctctctactctactccagcctgggtgatagagtgaaatcctgtgtcaaaaaaaaagaaaaaacaaatcatcttttattctcttaaagaatgaatttttcatgggccatcaacttcttcagtcatttaagtatttgtttagagaatatttcagttagaaactcaggaaatggagacctgacctcaaagggccctttccagtcataaagtaattagaaataaaataaaaacaggttgaagtgataagctgataagaaaatccaatttgtttccaaaattgttcacttacagctgtttttctcatgaatatagctatagttgtcatcagcaaatcagtggcttggaattcgaaaggagtgaaaatatacatcctgggtctcttgaactcctagtgtttgccagagctaggcagcaggatcaaatggtcaatttcagcctggccctgaaatcaaaaccctctaacagtcacagaagttctgcagctagtcagttacttactgcccacacttcactcagcacaatccttaaagtcaccagagggagcccaaatttgcgacaaaccagaatgctttccttttagggcatagttgtccttctgattctacttttgccctctcctttccaagactaatttagaaacgaagggaagtaggctaagaaaatcctcacctttaatattaataagacttgtgcagtccccggatgatcagagcccagactacataggacttgaaagaaagaatgagactttgatatggaatatgaaaaagtaacaggtaggaggggtggagagaccaaactgagaggcctagggcccagcttctgcagctctgtcactgactggcccggtgacgatcacgcctatttactaagcagggatgacctacgcttacctgtctacatttttatctgtgagatgaacgaaatgaaacctccaatggtttatttgccatgacaatttttaaaaatcagtaggaatgagggaattaggaattgagcccatgctataccttcttttcaaaagagatttcacatgtaccatctcatctgtattcctggagagatagtagcccattatgagtggctccaatttacagaaaaagtaactaaggcacagagtggtgatctacccaggacagcatggtctgtagaagaagcattggtctgtttagtgcattgaaatgtattccagagatattggtctgtaaagaccttcccagaatgtgtctagaaggttcaaccacctggtggaagacatagaacgccttgtcatgccttccccattccagcctggagttctctccatggtctcagcctgcttctatgaagcttagttttatagggagccttttaaccaagccaacctcagagtcccactggccaaggggatggtgggggaggcaaaggattctactggggcagtatgtaacccacatataagttccatccaaagcaacgcttccaaacctagctcaccaggacaggagaaaggttaccatcagggtactcttagctgagaactcatacctttcgggctttyattggcttgaggcatgagtgatcagcagagccccacatcacaatccctgtactcagatataaattatattagtgggcagggaatgtcaggaaacttaggttgtagaatctagatcaacaactgcttaccgaggagctgggtgaattgtaaagaaagaaagaaacaagtgttgaatgactgtggcctcattaaacatttctgtggcctggcctgtgctttgggctttcccagagctgtttcatgcaatagctttgggcagggcacttctttggacttactccaactacacaaggaggaggaggatgtctatggttctttccaccccagacacagtatcagtcacagccccaccttaattccactactccaattctgttctgagggtatcacaggatgctgtggtgggttccccagccccacaaaatccttttctcctctaaaacaggagaacatctttccttcctttctgatcatccatcttgcagccagcaggactcccagccagaacattgtcaatttactcagggatccatgaggcaccttttggaagatgagaggggttgggtgaaaaaaggaagaggaagtggggtgctggtacttctggaaacaagccatttctcagcctgctctgtgaaggtcccccaaaccctacacagatctaggaagggaaactgcattccaagaatgcatgggggctagaaggacccgctggagcatggatcccacccacaggagataatattttgaaaagagcacacatttaaccagggaagaagagcccatgccctggcttaagagcatagctgtttcctcctccatctgcccccattttcccaggcctgactagagcaagtagttaagccaacccaaatccagaagtatgaataatgcgtgaagcacaggaggacaggcagatggccttttcacctgcgcaggctatatagctctgtgcggaggggctgagagtccagcgcggcccctgtgcccctcagtaactgtgcaagaggaagtgggcctcccctgcgggggtatgaaatgtggggcgaggacttaggagttcaccgggaagtgccagccatcctggggcagacaccaagagctggagtgatttgtttacccttttttcatgagttaatttgcttccagcagattccattagtgacctgacagaccaagggcctggaggaggtccctggaagagctgctgaatcagcagactaaaggggcgaccaggaaggccagacgtcttgcaccgagccctttgctcagagtttctatttgaagagcttagaataactatttgctaagctcttgtcaaggcagcacctctaaaccatgtatggagagaagacacacaaaccttgaccaccaaatgtgaatggccaatcagaagctgacacaatcagctgctgactgaggaaaaatgattttatgggggaaaagaattcccacatgaaataataagcaaaagttataaacttattaaaaagcttgttaaaaacttacttaaaaagcaaaagtttaaacatggttccatctgcaactaggaactggtcggggagggagggtttgaacttcctttgagtttcaattgataatccccgaagattaagaaaatagtgatactattactactgctgctgctattattacaaataataataactacaattaacatttatttggcacctagtacatgctaggaagtaggcaatgagtttttttgtttgtttgtttgtttgtttttgagatggagtctcactctgtcaccaggttggagtgcaggggcgcaatctcggctcactgcaacctccgcctcctgggttcaagcaattctcctgcctcagcctcccgagcagctgggactacaggcacacgccaccatgcccagctaatttttttgtatttttagtagagacggcgtttcaccatgttggccaggatggtctcaatctcttgaccctgtgatccgcccacctcagcctctcaaagtgctgggattacaggcgtgagccaccacgcctggcctgcaaggagttcgttatgcatgatttcatttactccttgcaacatctctttgaggtagggaaactgtgtgggtgagaaaagtcacatagctgctaagtcatagaaaacgttcagagcaaaatcaaacccaggtgtaggccaggtgcagtggctcatgcctgtaatcccaggactttgggaggctcaggcaggcggattacttgaggccaggagttcaagactagcctgggcaacatggcgaaaccccatctctaccaaaaatatgaaacaaattagccaggtatggtggcatacacatgtggtcccatctactcaggaggctaaggtgggacgattgcttgagcctgggaggcggaggttgcagtgagccaatatcacaccactgcactccagcctgggtgacagagttaagactctatctcaaaaaaaaaaaaaaaaacccaggtgtgtccaactccaggcttgtgcacttacccactctgctatatggctaaatcccacaggctacagagagagcagggaagtaggactcaggagaactgcctccagccccacaggcaccctgactagctgtgggatcttagcaagtgatttcaacttgtgggccatcgtattccatcagatgattgatgtcttagggaccccttcaattcaaaccacagttattggtggactgcctgagtgccaggcactaagatagggggtgggggaatgtataaacaaaactaaggcgtggtccttccctccaggagtttacagtctagccctgccttatgcaaaagccaaagagccttaggtgtcccttcaggtctaaaatactactcagagattccttttgaacatgcaaagtatttctgacagcattcatattcatcttctatttgttctgtgtggacatttgcatggagaggtatctgaaattatgttcgtccaatggatttggggtgataattttgctctcatctttttacttttatgtgttgcttgaatttttagtaacaaatatacatcatttctataaaaacaaaggcatttttaaaatactgctaaataacactatatatgggtgtatatgtatatgtatatatgcacacacatacctatatacacatatatatttaaacagtaactggatatttaataatactgtggaattattgttaactcagataagattgtgactaggtttccagaaagaatctttattttttgcagatacatactgaaataatttacagataaaatgatgtctgagatttatttcaaagtaatctctagtgtgagagggtaggagtaggctatagatgagacaacgctggctctgagttgcaagttgtggaagcaatttgggtgctaggtgatgggtataagagtgttcacgatactacataggtttgaaattttccatactatacagtaaaaaaggaactcctttcaaggccaacagggaagcaacatttccccaaagctaagctaagcacccagctggcagcatttctacctggggtttctaccacccttggcttcctctcttctttgactatctatcacagtttaacttcattggttctctgcagcttcctccccccccccccccacaccattcccccctaaccttctggaatcacgtgttgtatctatttgtacattccagtgcccaggccatccctcttcgaccttaccctggcccaggggacagagcgggtgggcctgagcaatgctcccacacacctccgctcaaagtcagctgtttgctgtagaggtagaacagcttgactactgggggcgagggtcacagttcactcattcccccagcaaatacggagccagatgctggggactcagcagtgaacaagaccaaattgctaccttcacagagttttcatgctagagaaggagccaactataaatgttatctcccatccctcccagatttagggccaggggtatattcaccaagacattcctgaatcacctgggatcttgtcccaaataatttaaacctgaaagacatgatctagtgccaagagctagaataccacccaactacccatcccaatccagttccccatttaactgacaaaaaaaaaaaaaaacagaaatggtgtaagcccaccatgtaagtaaacataagtaaacagtggcagaggaaagggtacccagacttcactgtggcaggcccacctgggaccacattcagaatttttacaagcttwgctgcgatgttgaccaaagttctccccactttttttcatttgcttgaatttcacttttatttttattaacatcttttgttttgttttgttttgtttttgagacagggtctcaccctgttgcccaggctagaatgcagtggcacaatcat

SEQ ID NO: 4 - DNA, 93000 bp, Homo sapiens
caaagaaataaaagtaaaaaaaaaattaaaaatgactcaataaaagagaaatcacaatagaaaattataaagtataaaaaaagagccatcacacttcattcttcctaagtcctacaccagagttgctttaaatgtgtgtatttaatggttaaataagacctgaaaagggagttggcctaaaaatatttttaccgtraaacatcaatttcttcagagttaatgagaattatatgctaaccataccaaaaaccttgattagaatttttagcttagatgtattgattgatattaaaaagggaaagttgaggccacatacagaaagcaatggcgaaggacactgcctccaacagaaaatatgaaccaaaaagcataatggaaaaacatttacatgtaatatactaaatagatgtcatgccaacacagacacacaaggtgagaataccatgtgataatgcaagtagattgaaatgctaccggtgcaagccaaggaatgccagaaattgccagtaaaccaccagaagttaggaataaggaaggattctctcccttacaggttttcaaagacatcacggccttgacaacaccttgatttcagacttctagcctctagaactgagataataaatttctgttgctttaagtcactcattttgtggtattttgttacagcagttctaggaaattaatacaaacatgccttttaccacagttctctcccattggattatttaataataaatgatttaaaattagtatttggaaaagatgttttttaatgagtagacatattaatcaggtctcttttgacacagaaatgttctatatttcattttcatattcttgtcaaattataaaaataatatcataaatatggacatcgctacaagctattatgtacagtcactgaaaaatcagaaaaaacatgtgagttagaaatgtttatcaaatacaagtctacagaaaactgaataaaatttttattttaaaacatcacaagtaattacaaagacaaatattccaactatacaaactgtttttcacatatacatatatacatacatatatttaaggttggttgatctttcatctttttatctgagtaaaaagaagaacactttcctcattccggagatttttgatgttataatagttacctaaaagtaaagtgataagaaaataaaaattatttacatatgaatcattctttttgattaagtatgtagtcatcacctgacagttgtagtataggacacaagataaaaacaattcacctaacctaaagtaacttatttaattccatgaactacatcaacagctaaccatgacacgtgatccagatgaggcttgagagaacagaaatataaatttcacatcgttatgaaaataaatacggagatgaatcagtcgagagtgtaagaaaagaaaatctctttctgaaaccaatctttattaggtctacagaactgctgtggattcctctaaccagacatactcatatatagatgaatataaaaggtacaatgttaagtagaataaaatctcaaaattttatttatttacttattttttgtttttgttttttctttttctggagaacggggtctcgctatattgcccaggcaggtctcgaactcctgggctcaagctatcctcccgcctcttgcctccctgagagctgggattacaggcatgagccaccgcgcccggccaaaatctcaaaattttaaaaaggcaaatgctactcttaaataaatgaggtaacaaataacagcaaaagtgaaatacagatggaccgcaagtatcacatgtgacaggcttattagaattgagtactatcactgtgactttctatatattagaaattgagaaagtattcacaacagtgctgacatactaaggattatgcaagtatggctattattattgtctccttccaacagaatgtaagctctataaaagcagggatttttgcctgttttttcatttatatatcccaaatcttgcagcaatacatggacatagtagacactttgttttgtttttgtttttgagacagagtcttgctctgtcacccaggctggagtgcagtagtacaatcacagctcaccgcaactttgaactcctgggctcatgcagtcctcctgtcccagcctcccgagagctaggactataggtgtgtatcaccgtgcctggttaacttttgcattttttgtagacacagggtcttcctaggttgcccaggctggtcccgaactcctcacctcaagccctcctcagcctctcaaaatgttgggattacaggtgtgagccactgcacctggcccatagtagtctcttaatcatacttgttgaatgagtgaatgaatgacaagtggattaaaatgcctatttacaataacttctgctgttcgatagctgatgaagcataccattcttgaaacagtttaaaataatgttctaaaaacataatttcttagagataacatggggtaaataatttttgttctcctctgtaatacaacatatctgctgactatatacataaatgtatttttttttttgagaccgagtctcactctgtcccctaggctggagtgcagtggtgcagtctctggtcactgcaagctccacctcccaggttcatgccattctcctgcctcagcctccagagtagctgggaccacaggtgtccgccaccacgcccagctaatttttttgtatttttagtagagatggggtttcactgtgttagccaggatggtctcgatctcctgtccttgtgatttgcccactttggcctcctaaagtgctggtattacaggcatgagccaccatgcccagccaatattttcatattcagtagtaaacaactcttgttctcatgtatcaaaacactaattggttgggcactgtggctcacacctgtaatcatagcactttggaggccaaggtgggcagatcacttgaggtcaggtgatctgttacggctaacatagcaaaatcccgcctctactaaaaatacaaaaagtagccggatgtggtggttcgtgcctgtagtcccagctactcgagagtctgaggcacaagaatcgcttgaacccaggaggtggaggctacagtgagctgagatcgtgccactgcactccagcctgggtgacagagcaagactctgtctcaaaaacaaaaaaaaaccaccacaaaatgctaatacacttacctaatgatcaaatgaaaggaaaatatgtaccaaactgttctgacatccatcagtcatatcacacttcattttgaccactgtggcttccatttccatagtgcccaaaaacaactatatacatgttgtctaagtgaaataaattgtcttacctgaaggaacatagaacgaatccccagtacttaatatataaggtgtttcatgtaaagtacacaaaaggtcaccaaagttaacataaaaaacctgtaaaaataaaaataaaaatctcattcaaaactgaaccatgataatacttcaaaggaaccttaaaatgtagtgggaagaataacgactccccacaaatgtgctggctttaatctccagaacttgtaaatacattaaatttcatggcaaaagggaccttgagatggggagattatctttgataatgtaggtaggcccaatctaatcacattaagcccttaaaaatagagtactttctcctgctggaagcagagaagaaacgaaagagaaggaacagtcacagaaatttgaagcatgaaagggacttgcaccgttgctggcactaaagatgtggggccatatgccaagaaacatgagttatttctaaaatctaagaatgacaccctggccaacagccagtgaggaaatgggaacctcagtcccacaaccacttaaaactgagttctgccaacagtctgaacgagactggaagcagactggaagcagattcgtccttacagcctccagaaagaaatacaaacctgtcaacatcttgattccagtcttgtaatactctaaagagaatacctggtcaagctcatggttctctctacataactgtgagatagataatacaagagtattgtttcttgttttttgagatggagtctcactctgtcatccaggctggagtacagtgaggcgatctcggctcactgcaagctccgcctccagggttcatgccattctccagcctcagcctcctgagtagctgggactacaggcgcccgccatcgcgcctggctaatttttttttgtatttttagtagagacggggtttcaccatggtctcgatctcctgacctggtgatctgcccgcctcggcctcccaaagtgctgggattacaggtgtgagccaccgcgcccagcccaagagtattaagccattaaatttgtgatacagtcatgcactgcctaacgatgtttcagtcaacagcaaactgcctacatgatagtggtcctataaggttacaatggcatttaaaaaatcgtattgcctagtgacctcacagccatcatgatgtcccagtgaaaagcattactcacatgtttgtggtgatgctgatgtaaataaatctactgaactgccagtcacataaaagtatagcacatacaggaaaaagtggaggatagaaagtaggactaacttgcagctcccactcagatggacagaacagcatgtggaaactcacatcatgaacttttttgccagaagaactactgcaggaacataccaagaaaactgaaagaattcacagactctttgaaagaaatggcttgctgctgcaaactccatgagacagctgaacaaccgtgagtgcccaaagtgtgaaaggggggaaagtctgcctccaaacacatccttactggggaagctgaaaatccaggtcatgagagaaggatttaaccttacctagagctgaaacgaattgagagagccaagggaaatataatagtagaagcagaggcaggaagagccctgttaagtactcctggtttccaaggaaacccaaggaagccatttctgactttatctcatagggttccttggggatggctgccagtggaactgggggaggaccacagaaagaaggaaacttccagctgaactttaaataattttgatgaagcgtgaattttcctgggcagaattgggggaagggcgaataggaagttcagatacaagccagggtaggcagcaaggggcagggcctgaaagcccagcttgctttctcagcagggagacttatagcctagcgcaaaatgtcagtcctgctcactggctgtctggatacaaacttggtttggtggggcacagtaggagtgagactggcctagcctggctgcttgggagctgggtgaggccagtctgccagcttcccccacttccttggtgaccagtatgatgcactagagacagccataatccccttgggaacataactccagtggcctgggaaccatattttcatcccctacagtggtcacaaaaagctcagcccaaggagagtctgagctcagacacacctaatcaatcctacctgcacctgatggtctttctctaactgccctgtagcctaagacaggagctataaggccccacccatcacctgagaaacctgaatacttacccaggcaacctgtggcaaccttgtatcagcagatgctctcttgaaagtaccatctcctggctggtggccagccacctgctagcacaaccaatattaaagaaaaccagcacactaaacaaaactacaaccaaagaccgtcacagagtctgcttcactcccctgctacctccactggagcagctgctgagatccatggctgagagacctgaagacagatcatatcacaagacgctttgcaggcacttcccagtaccagcctggagccccatagctctgctgggtagctagacacagaagagcaatagcaatcactgcagactgcctctcaggaagcataatccctaggggaaggaggagagcaccacatcaagggatcactccatggaacaaatgaatctgaactgcagtgcttgacctccagatgtctcctctgacacagtctacccaaatgagaagaaaccagaaaaacaattctggtaatgtgataaagcaaggttctttaacacccccaaaagatcatactcgctccctagcaatagatccaaacaaataaatctctgaattgccagaaaaataattcagaaggttgattattacattactcaaggaggcaccagagaaagatgaaaaccaacttaaagaatttttttttaaaaatacaggattttgatgaaaaaatctcgagagaaatagatagcataaataaaaaacaatcacaacttccagaaatgaaaggcatacttagagaaatgcaaaatacattagaaagttttaacaatagaatcgaacgagtagaagaacttcagagctcaaaaacaaggcttttgaattaacccaatcaaagacaaagagaaaataaattaaaaaaaaaaatgaacaaagccttgaagaagtttgggattatgttaaacgaccacacataagaataattggtgttcctgaggaagaagagaaatctaaaagtttggaaaaatttgaggaaataatcaaggataacttccctggccttgctagcaatctagacatccaaatacaagaagttcaaagagcacctggaaaattcatcgcaaaaagatcatcacctagccacacagtcattaggttatctaaagtcaagacaaagcaaagaatcttaagagctgtgaggccaaagcatcaggcaacctatttaaaaaaaacctatcagattaacagcagatttctcagcagaaaccctacaagctagatgggactgaggtcctatctttatcctccttaaataaaacaattatcagccaagaattttagtatccagcaaaactaagcttcataaatgaaagaaagataaagtctttttcagacaaacaaatggcgagagaaatccccactaacaagccagcactacaacaactgctaaaaggagttctaaatcttgaaacaaaaactcaaaatatatcaaaatagaacctccttaaaggataaatctcccagggtctataaaacacacacacacacacacacacacacacacacacacacccaaagtattcaggcaacaactagcacaatgaacagaacagtacctcacatctcaatactaacattgaatataaatgacttcaatgctccacttaaaagatacagaacggcagaatgcataagcattcaccaacaaagtacctgctgtcctcaaaagactcacttaacacataaggattcacataagcttagggtaaagaagtagtaaaagatattccatgcaaatggataccaaaagagagcaggagtagctattcttatatcagacaaaacagactttaaagcaacagcagttaaaaagacaaagaaggccattatgtaataagaaatggactagtccaacaggaaaatatcacaatcctaaatatatatgcacctaacaccagagctcccaaatttataagacaattactactaggcctaagaaacgagatagacggcaacacacttatactcaaggtcttcaataccccactgacagcagtaaacaggtcatcaagacagaaagtcaacaaagaaacaatggatttaaactatacactggaacaaatggacttaatagatatttacagaacattctacccaaaaactgcagaatatacattctattcatcagctcatggaacattttccaagatagactgtatgagaggccacaaatcaagtctcaataaatttaagaaaaccaaaattatatcaagtactctctcagaccacagtcgaataaaattggaagtcaactccaaaatgaaccctcaaaaccaagcaaatagatggaaattaaataatctcctcctgaatgattgttgggtcaacaatgaaataaagatgaaaattgaaaaattctttgaactgaacaataatagtgacacaatctatcaaaacctctaagatacagcaaaagcagtgctaacaggaaagttaatagcattaaatgcctccatcaaaaagtctgaaagaacacaaatacacaatctaaggtcacacctcaaggagctagagaaataaaaacaaacaaaacctaaacccagcagatgaagatcaggccatttggtagaactaaatgaaaatataatcagaattgatagaccattagtgaggttaacaaagaagacagaagatccaaataaactgaattagaaacaaaatgggagatattacaaccaataccacagaaagacaaaagatcattcaaggctcgtatgaacacctttatgtatacaaaccagacctagatgagacagataaattcctggaaatatacaactccctagattaaaccaggaagaaatagaaactctgaaaagaccaataacaagcaatgagattgaaacggtaataaaagaattgtcaacaacaaaaaaagtccaggccgggtatagtggctgatgcctgtaatcccaacactttgggaggctgaggcaggtggattgcctggggtcaggagttcaaaaccaggctggccaacatggcaaaaccccgtctctactaaaaatacaaaattagccagaattggtggcgcatgcctgtaatcccagctacttgggaggctgaggcaggagaatcacttgaacctgggagatggaggttacagtgagctgaaatcgcaccattgcactccagcctgggcaacaagagcaaaaccccgtctcaaaaaggaagaaaagaaaaagaaaaaaaaaattccaggaccagatggattcacagctgaattctatcagacattcaatttatctatcagaaaagagacaaattcttggaaatacacaaccttcttagattaaaccaagaagaaatagaaactctaaatagaccaataataagcagcaagattgaaaaggtaataaaagaattgtcaacaacaacaaaaaagtccaggaccagatggattcacagctgaattctatcagacattcaaagaagaattggtaccaatccaactgaaatgattccaaaagacagagaggagtcaatacgcaagtcaataaatgtgaaataccacataaacagaattaaaaccaaaaaatcacatgatcagctcaatagatgcagaaaaagcatttgccaaaatccggcattgctttatgattaaaaccctcagcaaaatcggcatagaaggagcataactcaaggtaataaaagccatttatgactaacctacagccagcatcatactgaacaaggaaaagttgaaaagtttctcctgagaactgaaagaggacaaggatgcccactttcaccacttctattcaacatagtactggaagtcctggccagagcaatcggacaaaggaaagaaataaagggtatccaaactagaaaagaggaagtcaaactgttgctgtttgccaatgatatgatcatatagctagaaaaccctagactcatccaaaaagttcctagatctgataagtgaattcagtaaactttcaggatacaaaatcaacgtacacaaatcaatagctctgctatacaccagcagcgaccaagctgagaaacaaatcaagaactcaactccttttacaatagccacaaataataataataatttggaatatacctaaccaaagagatgagaaatcatagacgacataaacaaatgaaaacacatcccatgctcatggatgggtagaaccagtattgtgaaaatgacatactgccaaaagcaatctacaaattcaatgcaattcccatcaaaatactatcatcattcttcaaagaactagaaaaagcaatcctaaaattcattatggaaccaaaaaagggcctgcatagccaaagggaagactaagcaaaaagaacaaatctggaggcatcacattacctgacttcaaactatactataaacatatagttaccaaaacagcacagtactgaaatgaacataggcacatagaccatggaactgaatagagcctagaagtaaagccaaatacttacagccaactgatcttcaacaaagcaaacaaaaacactaagtagggaagggacaccctattcaacaaatggtgctgggataaccagtaaggcacaagtagaaaaataaaactggatcctcatctgccaccttataccaaaatcaactcaagatggatcaaagacttgaaactaagacctgaagccatgaaaattctaaaagataacatcagaaaaacccttccagacattggcttaggcaaagacttcatgaccaagaatccaaaagcaaacacaacaaaaacaaaatagatgggacctaattaaactaaaaagcttctgcacagccaaagaaataattggcagagtaaacaggcaacggcagagtaaacagacaacccagagtgaaagaaaatattcacaaactgtctgtgcaacaatggaataatatccagaatctacatggaactcaaacaaatcagcaagataaaaccaaacaatctcatcaaaaagtgggctaaggacatgaatagacaattctcaaaagaagatatacaaatggccaagaagcacacaaaaaaaatgctcaacaataactaatgataaggaaaatgcaaatcgaaaccacaatgagataccacctcattcctgcaagaatggccataatcaacaaatagtagatgttggcctagatgcagtgaaaagggaacaattttacactaatggtgggaatgtaaactagtacagccgctacagaaaaccttagtagagctaaaagtagatctaccatttgatccagcaatcccactactgggtacctactcagaagaaaagtgagtcattatatgaaaaagacacttgcacacgtacatttatagcagcataatgtgcaactgcagaaatacggaaccaacccaaatgcctattaatcaacaagtagataatgtggtatacatgtaccatagaatagtactcaaccataaaaaggaatgaaataatggatggtatttgcagcaacctgcatggagttggagaccatcattctaataaagtaacccaggaatggaaaaccaaacattgtatgttctcacttataagtgggagctaagctatgaggatgcaaaggcataagaatgatacaatggactttgaggactcagggggaagggtgggaggaggagaggtataaaagactacacggtgggtacagtgttcactgttcaggtgataggtgcaccaaaatctcagaaatcaccactaaataaataatctcttgtaatatggtttggctttgtctccccacccaaatgtcaccttgaattgtagctgccataatccccacatgtcatgggagggacctagtgggaggtagttgaatcatgggggcagttaccctcatgctgttctcatgagagtgagttctcacaagatctgatggttttataaggggcttttccccctcgcttggcaattctccttgctgccaccatgtgaaaaaggacatgtttgcttccccttctgccataattgtaagtttcctgaggcacccccagccccacagaactgtgagtcaattaaacctctttcctttcaaaattacccagtcttgggcagttctttataggagtatgagaagggactaatacatcctgtaatcccagctacttgagaggctgaggcacgagaattgcttgaacccgggaggcagaggctgcagtgggctgatatcgtgccactccagcctggggacagtgggagactctatctcaatgaaagaaaaaaaaaaattatctatgtaaccaaacactacttgttctccaaaacctattgaagtaaaaaataaaatataacacaattttgtgtggtacaaaacacttggtaatgataataaacaactatgccactggcttatgtatttactatacttttatccattaccttagagtgtactcttaccacttatataaaaaaaaaaaaagttaactgtgaaacagtctcaggcaggtccctcagtaagtattccagaagaaaccaatgttattataggagatgacagctccatgtgtgttactattcccaaagaccttacagtgggacaagatgtggtagtgcaagacagtgataatgatcctaatcttgtgtagcccaaggctgatgtgctgtttgtgtcttactttttaacaaaaaagttttaaaagttaaaaaaaaaatagaaaaaagcttatagaataaggaaataaaatatttttgtacagccaaacagtatggttgaattttaagtattacaaaagagtccaaaagttaacaacaacaacaaaaggatataaagtgaaaatgttacagttagatgaggtttattactgaagaaagaaaaattctgtttatgaatttagtgtggcctaagtctacagtatttataaagtctacagtagtgtacagtaatgtcctaggtcttcacatttactcagcacttactcactgactcatccaggaccacttccagtcctgaaagctccattcatggtaagtgccctataagggtaacatttatcttttatgccacatttttattgtactttttctacatttagatacacaaatacaactgtctacagtattcagcacagaaacacgctgtacaggtttgaagtacagaagcaacagggtatcatcctatatagcctaggttcgtagtaggctatatcatcttatgacgttcataagacaaaatagcttaatgactcatttctcagtaacacatagctgtaatttgttagagcagcaactgaaaactaatacagatgtccccaacccccaggacagggaccgctactggcagtggcctgttaggaatgggctcacacagcaggaggtaagcagcacgccagtgagtgttactgcctgagctctgcctcctgttagatcagcagcagcattagattctctcaggcacatgaaccctattgtgaaatgtgcatgtgagaaatctaggttgtgtgctccttatgaaaatctaatgccaactcccactgccaccaccaatttttgtggaagaaaaattgtctttcacaaaccagtccttggtgccaaaaaggatggggaccattgtaatacaggaagagatttcttttatttttccttattttgtttttccttattacttactggcttatgaaaattctacagccactgtaaagattatcacctacactataaagattatcaccgcactgggcgcagtggctcacrcctgtaatcccagcactttgggaggcctaggtgggcggatcacgaggtcaggagatcgagaccatcctggctaacacagtgaaaccccatctctatgaaaaatacaaaaaattagccaggcgtggtggcgggcacctatagtcccagttactcgggaggctgaggcaggagaatggcgtgaacctgggaggtggagcttgcagtgagctgaggtcacgccactgcactccagcctgggtgacagagcgagactccaactcaaaaagattatcacctacactaaaaaaatacctaggctttatgtatgcctctttaaaggtcacatgcttaggacaacaaactactcaatctgattgaagaatcaaagaaagcaaaaagctaaatccctattcccctcaaaatcatatgttaaacaagcatcaagactaagaaagtaaaagaggataaatctctcaatcatgctggctttcatattcaaacatgccaaatttcatactttatacataggtagcacacactggcagtgacctggttttttgagcaactaaaataaacagcataaggccttcaaactttgagattcagccattgttagaaattagtttgtctcctgaaaattcacactctggaatcttaacccccccaatgtgatgggatcaggaggtggggaatttgggacgtaattaggtcctgagtgcagagccttcaggaatgggactagtgcccttataagagacacagatcaaagtctatggtattcttattatagcagcccaatctgactaagacatccatcaagaatgttttgcctcagataattatttctcctccttattttttattactactttgtacaatgatcataatataccagaataacaataacagctagcacttatatagcacttactctataccaagcagtattatgagaactttattcttattcacttaatgtatatgcccactaatgagacagcgactactttagtagctttttatggatgaagaaactgaggcacagagaggttaagtaattttccaaggtcacaatgtaaatggcaaagggggggagtttgaactcaggcatttagattacagaattcattccctaatcactgtgatatactgcctccctaaatggggaaaaaagccccccgaaatgtttcaaaggyatttttataacttaataagacaaaaaaagttattacatccaaaaataatttgccttaatcaaaaagacaaaaaagtaatactaaaaagtatatatttctagtgtttttttctcatctattcaatttggttctctaagcacacctctcctcatttctgtaaacatttaattaagaaagcttttgaaacatacaaaaatagaatgawgaactctcatgaatacttaatgctaaccacctgcccaagccagagtctactatcctcactccatcttatttcaaaataaatgcccagtatcataattcatctgcaaatatttcagtatgtactgaaagatcaagtgcttctaaaaaacataaccgcaatactgttatcacacctaaaaaataaatatttaataccaaatatctagttaatagtcaaatttccaatcatcagttaaacatatcttcaaggatttctttgaatcaggatccaggttagcaccacatacagtgattggttgatctgtttcttaaatttctcaatcaatattagcggttctcaatcaaggtgattttgcctctcagggacaacggacaatttctgaagacatatttgattttgtcacaactacagtggtgctactggaatctaatgagtagaggccaggtaagcttctacttacagggccttacctacaggacggcccccactacaacaaagaagtatctaatcaaaaatgttactagtgccatggttgagaaaccctgattccctaggtttcacctggttcttttttatttcttacatttaatttattgaaaacattaagcagtttgtcataaaaatcttcatgcaggtggattttgctgactacatccccaggtatcatttgaaagatttcaccacactttatttcttgtaaactggtagttaaatctagagacttgatcagattcaggttttgtatttgcttttaggtttttttttttttttttcttttttaaggcatggggttggcaagactacttcttggatagtgttgtatttttctatcaggaggcacataatgcttggttgtattstttttagttatctgtcagccactgagccttgatgcctagatcccaatagcttatcagggattgcaaatggtagtattttaactccaacattccttcttcactcattagctggaatattattctaataagaacaaactcatctattatttgattacctaatagcacagtttatatagaaaaggcagaatcagttgttaaagtgagttggcttcctagaatcctccaacagtaacaaatttttgttgtagtagtagtagtagtagtcttagaaattcatggatttagatataattgatacatatcaatctactgaagttattcttgttaatactcaagtttcatatccttagccagccagtggtagcatcttcaagttggaacctgaaacatgacccaatcttaatggtttctgattagtagtttgctatcgattccaagctcagtttcaggcctagaatcaggcattcctccaaggaactggttcttttaagtaggttgctgtcacctttttgtttttttagctctgaaacatttgtctaattttaaaaatattctcaaccatttttcattgggttttttctctctcctgaaattcttattatttgtatttaggcatgcttttctctcttctctacattatttaactttaatattttctactttttaatttccttcttgtctcctgggaagttctacaaccagctctcataattaatatgtaaattcttctgtagtttgattttaataaacctactactcttctcttttaaatattctctagcagtgtttgaaagagagttaatggcctatgctggttctccatcttgtcctgtttattatctttttcaaaagcatatatttgtaagtgtgcttcatgttttaaaatgtaaaaatacgagtcttattaaaaaaaacttcagctttaattttcatttattttcattataaaaagttaaaggtaatatatagaagaaataaaatcaactaaaataactacataatcacagagtaaaacatgtattctcttcaagattttatttacatttttaaattctagttagaaaaatagatactatatacaaagaacttttatcttgcatatttgcttaaacatttatcccaagggtcttcatatatggctgttcttcaaaataaaatgctcaaactaattttaatgtgcttagtgcagtacctggaacacataagttctgtataactgtttattatatcacagaatggtttatcccattactaagtcaaaattaaaatataaccattttcttcctgtagcacattgtagtggtttctaattctgcaattaccatcaatgattcaataaataactacatatgttcagcacccctcactctgaacttccaaattacttccctgggaaaaatttctagaaatgagtcacaggttacagggtatgaatacttttctaataatttccattaactcagtaactataaagtgtcatttggatttaaatgtgtattcctttgaatattagccagattacacacttttaaacatctgttactcaaatttccttttgtataataaaggcattacagtttaataggtaactgctattacttcagtgatgataattcatgtttatcctcattattagttactttattattatacagggaccatctatgcttttaaaatgtgttattttcactcataataataactggaggcctataacattttcagtttgaattaatgaatattgttaaattattttaaatcatgattctaactatactgatgtagtaataatctttgactttcatatgtatcttttccttgccttgcctaaatttgcccttctttgttaatataaactcaagagtcttcacaatttttccctcctttttgaatttactttaagtttgttggcaaagagaatcattctgactgtgatactttagtagcacaatttcagactcctgaaatgtcagatactgaaagatgttccttagctatattttttaactgctggtataatgttaaatattcttaaaatttggtgcttttcaaattctatattctacaattttcaaactcagactacaaatattttttatatatataaaatattcctgttatacatacacacacacacacacacacacacayacacacatataaaacagaccaatgttgcagaggtgtatgtctctaaatgggggtgggggtggaagaaaggagataaagagaaagaaggagaagatagaaactgactcaccttgaatctcattacaacttcagccagtaatattgttacatataatagtatattatttagyacttactgaagcaactagcttagtcctgagtctatgtctaaatagttaagtagtttttttataatctcactcattttatttacttttttctcaggttactgttttattgatatataaaaattttacatggtacatgtcacattttaatacctgtatgcaatgcataatgatcaaatcagggtaactgggatgtaagtgatttttgaagaagtcttttaacctatttctctactgcattatcatagaaatgtggaattagatttaatctctataatcccccccagcactaaaattctaatgatttgtttgcaaacctatatttaagatgtttttaagtaaagaacattccttaaatttctgaatctcaaaatacagtgctatgcagagaacagatattgtcaaataactgttggctggttgactctaaacagatttaacaaataaaaacctttctctgtgtggtgtagtaatcgaatttcatttctgagaaaacagcattttaatgtctcatcaaatccaataaatcagagttctaccaagagtgaaacataaatatataaaaaaagtactcaccaatatatcctggccaacatgctgctttcccttttcttcttgtggtcctaatatcaatttcccagtagaaaaaaagggtgtatccaatgtcttgtataccttcaactcaccatgcttaacaaaaaattgatatgtatcttgtggccttacaagatctaggagtaaaacagtaatacaaatataaaacaacagcagtattggttaatgatataacatatacacatatatataataaagagtcatttctggatataaatctgccttagagagttgtttcagagcattaactctggagctagaatgccagaggtcaaatcctgtctctgtcttaaaagctgcatgaccttaggcaagttacttaagctctctctcactgtgcctcaatttccttttcgataaaattaaataataataagttcatctattcgatattaatgagctgctgtgaatatcaacgagttaatgtgtgtaaactatttaaaatattgtctggcaaaaagtacgcactgttagcaccagctgaataacaaaatggcagtattataggaactgagacagaaaatagaattagctgagataaaaaaaagaattctctatttttaaagtttaacataaaccacaaatgtatcatcaccatgccaatagattttttttcctgcttgactaataatttttattaggtaaagtttgtgagaaagcagagttctaatggttgttcataaattactacctcacttacaaaaatttccattacttaacaaacttttccagatctataattaataaattattctgtcatcaatgtctgattctgtttcccaggatatttgggaatgttagtgatcctacagactacatgatatagaaataaatatatatatatatatatatatatatatatatatatatatagaaatatatagaaatatatatatagaaatatatatatagtagattcaagaaacaaataagaaatgaacttttgacaacactcacaataacctggtagagtacagcaatgctttcagttaagacactaaacaaaactccatacttctaagctctgttaccaaataaataatctgcatatagagatacctttgctaaggtgttaagatattaaatgaaatctattttcatggycaaaattttaagtaggagtaccattattactacctttctttttttaggaattaactaactagttttattattattattattgagacagggtctggctctgcacacccaggctgaagtgcagtggcatgatctcggctcactgcaatctccacctcccagactcaagcaattctcctgtcccagcctcccaagcagctgggactacaagcacccaccaccacgcccagctaccattaccgcgtttctgatttgacctacttctcctctgatataggacaaacagcccttagtactcaatggtacagtcataacagttgttaawatatttaaatatttcatatatatatatatatatatatatatatatatatagagagagagagagagagagagagagagagagagagagagagagagmgcctggttgttaaacagttgcgtaatccataaactcctatcccactatagcccatcccttggggatcttacatgacctgctagagactaaatatttaatccaatacagcaggaggcttccaggactttgcagcaccagctttaaggttaaacctggcatctgtacaactgattgatgcccttgctagtcatcctcacaaaggattcatatcccaggtaacattactgccatctgtaggcccagaagtttgtctgtgccctacccacaatccctgcctggcttcatgataagcgtatccttgagtctgccaactatctatctacaattccccataaacagcctctgttcccatgtgtcctcctggtcaaagaaggcctagaccctgttgggggagacgacattcctgattgtagcactacttgtgccccagaggacaagtccggggtgttaagtgtcccctggagctgtctgatatcaatattcccccacagttgtcttcacataggttgctcgttggaattagactcttctggactttagcactgatagaattggggagagaaagggaragtagacaggccaatcatcaagcaagcaatattttcttacaaattgtttaattaagtattttcagtatcatgcctgatcttacccatgagaataatctctcttgtttctgggtcctttaccctcgttggctgcaaaggatctccaagaggtatacctagatttaccattaagttagtctctgcaaaagaaataccattgaaatacaaactacttacttaaaattattctcaatcccaaaaagttcagtacaaaatatagctatagagaagttataaaactgtcaaacgcaaagaagtctcttcctatttataaatcactctgataaacaaaaattcaaacttaaaaacccataatgatttaatataaaagcaaacaccctaaacttcctattttctgtaagccttaacatgtaaactcttgcattatcaaggtattaagtgatgttttgcataatctctaagtgagatagaggtatataaaacactttagaaatgtctatgttaaccatagcttggrcataggaatggtgggtttcatttgactgggaaatttactcatgaagaaatttataatatgctattaataattttttaagaataaaattagcttactttccatttggaagaaagtagacattaaaaaatgaattttacctatggtattatttctgaagtttttggaagtaaatttcatattttgcaaagagcttcttctcaaagtactcctatttaaaataaaatctaaaagttactttcagaaataagttcatacttctttcatcgttatcaagacagatccttttcttattagattttttgttgacttttccaatattttcttttgccttccttttagacgatattgtgtctggagatagtactccactaatcacgaatcctcctgaaatttaacaaaaaaagtaaaatatacatgggaaagacaaaatcttgaaacaaaactccttaaatttaatatggcacatttcctttcaaagtaccaaagaatatatgtctgcagctaatagttaaaataacacaaataccaaccaatttcattatatctctaccaccctaaatcagaggctgataaaacaggattagatgatgaaacatgattagatggtcctattgctcccctgaaatcaacagtcatcagtggaggcttttaaaaaaaaaaaaaaaaggagggggctagcaatgaactatttatagaaatccacatgagtttagtcctttgacttagatatatccatcaaagaaagaaatatggccaggcacagtggctcacacctgtaatctcagcactttgagatgccaaagcgggaggactgcttgagcccataagatgagaccagcctggacaacatagcaaggcctcatctctacaaaaataagaaagaaaataactctacgattaacactacactttcttgcccaccctacactactttgtagaaaactatgagaaaatggaaaatggttaataggaaaaataatgaaaactactttacctttaccagttacaattttctcacgttctaatctaacgctttatattatgcaattggaaatcttgtcagatgatacaggaataacaacattcagctaccaaagagaaaatatcagcatctctacattaatcagacaaaaatgaatttaaatcctattatcaaaatttgggggggtgatgattaagtaaggtaatgtatataaacatgtagtgcagtgtctggcacatagtaaacaaattttttattgacagatattataacataaataagttttacctgatggccttccttgataatctattcgctctcctcgccagtactccaaaggtttcaaacgtgttctcttggtcctgcgaacatttggtgtgttggagggcaatactataaaaagatgtcagacaaaagtgtatacatagtttttagttgatggtacttagcagtggaaagactgtcttttagaacatgaaagctttattttttagaacatgaatatttttctagacaaaagactagaaaaaacaaatatttatgctaacaattaaagaaaagccaatggaaaaacaggctaccaaattggcaaatatttaaaaacctaataatactcagcgttgacaatgttaaatgtacactcatcttatctgaacaatgcaaagttctgtatactaaattgagtttgttggcttatcttcaaattcccatgttcttacctattttttgtttgctaaagctatgctgaagctaacragaagttgcctactgctcttaggcataatgctcaatgttcccctctgtaaatactgaagccctgctcaggaacatttttatttccctttccctactcctgattcatcatttcaccccaagacaagcattaagtattgagaggtatagcagtctctcatcacataggcccacaaaatactgacaatatctaagttctggagtaaggcaatgagagaaagcttcactcctattggtaatctgagtatgagtgaaagagcactcacagcctcaaataaagggagaaacatggaaagccacccaacatcacagaaaggtgggaactatcatgtatcttgactggcaaatatctctttgggaaccatggattgttaatctttacatgggcctctccatgggttccacagttcttagctttgtctacttactatcctagctactgctttgtttaggagtcaactggattaaagtggaaggagatgctgtcaaggaagccatctacctggtagttacagtttctttgacaaaattctccaccctagcttcatagctaagggaggatcatgccccctactatggggcaaaaagtgagagggcaataggatttataaatggacaatagactaaytcaagtggcttgtggtgacttactatgaaattcataaaaactaagtgcataattttaatttatctgccaattaatccacataatcgtatttctcctgcttaagaagaaataagttatatttagaaacagaaacttaaggtatttttctcaatgaaaatattaaaaaagaaaaatattcttacctagtttgtgatggattctgttctttggtatcactttagattgttttgagtcatctacaaaatgcaaaagataatatcrtaagaaatgactgctaattccatgttaaattaaaatgtgtttcctggtcaatttcagtatgagtattttaaataaagtttgacctgataatgtattttattactccttttgcttttcattgctcaactataaaaactaaggaaaagaactatttctctagactttgctacaatkaatacattgcaagtttgtccaatccaccttattttgtggttgttctgttttgttttgttttagacctttagcagcctgaaaccatgctttttagtttctgtctctggcgayaagtggaaaagagggatgaggaaggggttttattggaccaaccagaaacagaaactaagaactcatgactgtattcgctcccttggacacccctggtttttattctaaacagtgtaacagttaaaacaaacaaacaaacaaaaaaaacaacagattttctattgctcatggaaagatgaaataagccacttgtggataaaaatgtagggcctgataatggataattaatatgctatttatgaactatctgtaactttctctttaaagttctaaaatagtgtaagtgtactgaatttagcagtgtgccaataagctcaggggttctcaactttggtaactagcacctaaagatggctgtcatcccttctttgcctttctatgcacaaatgttctgtatcaagaagcagagtctcgttcccttctccttcaatctctgctggagttagtgacttgcttaactaatagtatgcaacagaaatgatgttctggggcttaaaaggctaagtcctaatacaatctacaggttccatctagaagtcttgggatctcactctaggggaagacagcaacaatatgaagattaacacaagactgccatgctgtgaggaaacctcatgtggccacatggaaaagccacatggaggaaaagagatgcttggccaacctcaatgtcccagttcttccagctgggtccaaacatgtaagtgaggaagttacctcgaatgtccaacccatttgaactttcagatgactccagccccagcagcttgcatttaactatataaattcatgagtgtactcaagtggcaattacccaactaagccaagtcaattcatagaaccatgaaagataaatcaatcactgtattaagcctttaagttttggggtggttggttacgcagcaatatacaactgggacacaatgtccatgaaccacctaaaactgcaaatacaattttgtatgaaatatataccttttttccctaaaaagcrggtctgagcttttatcatattctcaaatgagtccatgaaagcaaacaaacaaaaattgttaagaatgattgaattagatattttataaaattgctggtttggaagaaacttcagtgatcataacatctaatttccctgtcagaaacaggcaaatctctagacatcagaagtagattagtaattgggtaggcccagggaaaggaaatgaaagtcggctactaaagggtaaaggggtttctttttgggggttatgaaaaggttctaacatcgattgtgtcaatgactacatatcattgatttgtacactctaagtggattaattatatggtatgtgaagtctagcttaataaatctgtgtaccccccaccccacccccacccccacccccaaaaattcaatttcctatgcagtctcccctagaacaagtagaggtctcatctctgttggaaattctcctgtgacactgggcctcggaggcagtgtcagagtgatacaaggaaccaaagaaacaagtaaatatactgaggataatgggagtcaggtttctcactatttgagaagaacttgtaataaatacaggcggccaggcgcagtggctcacaactgtaatcccagcactttgggaggctgaggcaggtagatcaggaggtcaggagttcgagaccagccttaccaacatggtgaaaccccatctctactaaaaacacaaaaattagccgggcatggtggcacacgcctgtaatctcagctactcaggaggttgaggcaggagaatcgcttgaacccagaaggcggaggttgcagtgagccgagatcacaccattgcactccactctgggcgacagagggacactccgtcttaaaaaaaaatttaaaaataaataaataaaaatacaggcatacctcagagatattgccagttcagttccagactactgcagtaaaacagatactgcaataaagaagtcaaacagttttttagtttcctggtgaatataaaagttatttcttttgctgttttgttttggttttttgagactaagtctcactctgtcacccaggctgcagtgcagtggtgggatcaagactcactgtggcctcaacttcctggcagcaaatgatcctcccgcctcagcccgccgagtagccggaaccagagatgcacaccaccacgctcagctaatttttgtattttttgtagaaacaggtttctggcatgctggccaggctggtcacaaactcctgggctcaagtgaccggcctcgcctcccaaagtgttgggtggctcccaaagtgagccaccatacccagccaaaagttatgtctatactatactatagtctattaaatgtgcaagagcattatgtctaaaaaaatcagtgtacatataccttaatttaaaaatattttattgctaaaaatgctaaagatcagccaggcatagtggctcatgcctgtaatcccaagactttgggaggcccaggagggtggatcacttgaggccaggagtttgagacaagcccgaccaacatggcgaaaccccatctctactaaaaattaaaaaaattagctgggtgtggtggtgtacactttgtaatcccagctactcttggtggctgcggcaagagaatcgcttgaacccaggaggtaaaaggtttcagtgagccgagatcacaccactgcactccagcctgggtattagagcaagcctctgtctcattctcaaaaaataaaaataataaaatataaaaatgcttatcatctgagctttcagtgagttttaatctttttgctgatagggtattttgccttattgttgatgactgctgactgatcaggctggggtgtctgtggcagtttcttaaaataagtcaacaatgaagtttccctggagaatataaaatgctgttgtatagcattttactcacagcagaacttctttcaaaaccgcaatcaatcctctcaaactctgtcgctgctttaccaactaagttcatggaatatcctaaatccttttttgtcatttcaagggttcacaacatattcaccaggagtagattccaactcaagaaatcagttccttcgttcttccataagaagcaactcctcatctgttcaaattttgtcatgaaattgcagcaattcagtttcatctccagactccacttctaattctagttccctggctatttccaccacatccagttacttcctccattgaagtcttgaacccttcaaaatcacccataagggttggaatcaacttcttccaagctcctgttaataytgatattttgacctcctcccatgaaacacaaatagttttaatggcatctagaatggtgaatcctttccagaaggtttatttactttgtccagtcccatcagaggaatcactacttgtggcagctactgccttacaaaatttatttcttaaataataagacttaaaagtccaaattattccttgatccatgcatgagctgcagaatgaatgctctcttagtaggcatgaaagcaacattaatctcctcatctttgtccattagagctgctgggtggcctggtgcattgccatggatgtgctgtcacccaggctttgttgttctactaatagagcaaagtagatttagcataattcttaaggactctaggatttctggaatggtaaatgagcactagcttcaacttaaagtcaccagctgtattagcccttaacaagagagtcacagcctgaccttggaagctttgaagtcatgcattgacttctcctcagctatgaaygtcctagatgacatcttctttcaatagaaggctattttgtctacagggaaaatctgttgtttagtaaagacaccttcaattatctcagctagattttctggataacttgctgcaacatcagaccttgctgcttcaccttgctcttttatgttatggaaacagcttctttccttaaacctcatgaaccagcctctgctagcttcaaacttttcttctgctgcttcctcacctctcagcctccacagaattaaagagagttagggccttcctctggattaggctttggcttaaaggaatgctgtggcttgtttaatcctctgtccagaccactgaaacctctatatcagcagtaaggcagtttccctttcttatcattcatgtgttcactgtagtagcacttttcttttccttcaagaacttttcctttgcattcacaaattggctgtttggtgcccgaggcctagcttctggactatctcggtttctgacatgccttcctcactaagcttaatcatttctagcttttgatttaaagtgaaaaatgtgtgactctttcttttacttgaacacttagaagccatcgtagggttattattggcctaatttcaatattgtgtctcaggaaatagggaagcctgaagagagggagaaagatggggaactggccagtcagcagagcagtcagagcacatgaattttcactttcttaagtagctgtggtttgcggtgccccaaaacaattacaatagtaatgtcaaagatcacctgatcacaaatcaccataaaagacatagtaatgaaaaagtttgatatactgtgaaaattaccaaaatgtgacacagagacacaaggtgagcacatgctattgaaaaaaaaaatggtgccaataaggcttactcaacaaagggttgccacaaaccttcaatttgtgaaaaatgcagtatctccaaaatgcagtgacacaaagcacaataaaacaaggtatgcctgtataaatataaatatagaaatagatatagatgcctgtattgtatatggtgtgtacatatgtgtatgtgtgtgtgtatatatatatctatttcctatctctgtacactgagaaagactagaagcaatggtatcccaaacaaggatcacgtcaagtgcccaaatcttggtttctaaatgccatcttccactaaaaagaaccaggtttcctggagcagtaattgatcccagagctggggcaggaaaaagactggaacatcttatgccaaaaaacaaagacagtattcacagaatcatgacaaaagcacacagagaccagctgaaagaaaatcsagtgaccaaatctatcacaattcaagtatcataataaatggtcaagattttacaaccccatggcataaaatagtagtagtccatactgatataaataaaaagaatcatgaataaaataattggcatgcgggagaaaaactggcaactaattaatgcggaaggaattaaagaaacagaaaatagaaaataatgtggtaccatcattagtggctgataattcaagtgggagtcttgaatgtatgttaaggttggtgaatggaggtttgacaagaaacaggctattaagagtatcagaatatcactccacaataatatttatcaattataagagaaaagcagtgtctttacagtagagaaacctggcagacaataacatgaacaggtaatcaggattgatatcatgtcagcagggcatggtggctcacacctgtaatcccagcgctttgggagactgaggtgtgcagatcacttgaggtccagagtttgagaccagcctggccaacaaggtgaaagcctgtctctactaaaaatacaaaaattagcccagcatggtagcatgtgcctgtaatcacagctactcaggaggctgaggcatgagaattgcttgaacctgggaggtggaggttacaatgagctgagatcacacaactgcactccagcctgggtgagagagcaagactccatctcaaacaaacaaacaaacaaaaaacaaaagcatcatgtagatgggtgaacgttgtgtgcctcctgtgtgatgcacaaattacatcccctaactcctaaccctatagcatcatttctgtagtattcctgtcaaatatgaatggcacacatttgatcatgagttaagttaggaaaaaaactaagaaactgttccatgttgaaggaaactaagggacatggcagctaaatgcagtcgacgatccaggactggatcttgaaccaggaggaagaagaaactctgagatccaggactggatcctgagctagaagggaaaaggaactgctagtgaaatctgaatggagtctgtgaatgaacctgtgttgtattaatgctgatttccttatttgtatggttcgagggtagttatatccttgtcttgctgaaatacattatggggcatttaagggaaataatatatcatgtctacaattccctctcaaatagttcagaaaaaagatgtatgataatagacgtgtatttattagaggaggcagggagggagatggaaaaatgttgtaaaatgtggacaattgtgaaatcttgatgaaggggatatgggatctctgtataagactgaaattatttcaaaataaattattttttaagtgactaacacaagggacaactcctaaatttcaaagattaaaggatcctagtaagtatggagatggaagaaaacaggttatctacaaaggaaagaagaaataaggctgccttcaaatttctattcataagcattaactctcatgaagcaaaatagcaatacggtgatagtttaaagaaaaaaagatcatgactcaagattatgttctctatttagctggtggttcattgtgtttaaaaagaaaaaaaaaatcctgagtccttgctagaatatgtgagaatgtctaccaactttacaaagaagtaacaagtatatctgttgacaataagtgtatatatattaaacaatttattaaaggaaaaagtactgacacagcgagtcaaaaacaattcaatcatatgctgtttcttagccacttttaattctctaataaaagttaaataaaaagataaagaaacaacaaccaaccaaaagaaagcagaagtcacaatactaatattagacaaaacaaactacaaagtaaaaagcatttaacacaacgaagcagataaatttgaccaaagcaggtacactccatatgaaggcttatgtgatcagtaacagcactgaaatgtacataacaaagactacagaaaatacaagggcaaagacagttgcagtgggaacactttacttcaactctagcagtccttaatagatctcaaataaaaagaatacataggttgagaacatcaagcttagtatgtccaaatctaacrtcctgttcttttcctcaaaatctgcttcttccccagtagtccccagatcaggtagtaatattgccattcttccaggagctcgggccaaaaaccttcaagttctctctaacgcctctctttttcttatacaccacgtatcgtccatcagaaaatcctgttgactttaccctcaaaaatacctaaaaatcctcctcctgctttccactttctactgctaccacattggtctaagccaacacctctcactaggattatttcaacatctctccagctagtctccttgcttccaaccttcctccatcccttcaaccccatcagtcaactcctaacacaggagctgcagtgattctgttaatacaggtcaagtcatgtctctcttctgctcaaaaccctctaatggcttcccatcgctcttagtaaaattttgcctttaacatcctatgtgatctttcattctgttgcctctgtgacatcatttttcctactactcgttcgctctcttcctctgctctaaccctctggccttcttggtgttcctcgatcaagacagactcttgaccacataagaacttttgcccttcatcttccctctacctggtacactatttacccagacagctgcacggtttgctgtctcatctcttcaaatctttgctcaaatgatcacttccttagtgaggacttctctgcccatctacctaaaaatgtaaacttcatttcccaccctaaaagccatgctttatttctctactctcaacacccaacaaatcataaatttgttatctttttatattgtctgccatcctgccccttccagaaattaagctggagggcagaaatttttgtcagttttgttcactgacacacccctacccttaaaataataagtaaatattccataatttttcatatttaagaattccataaatattaaaagtatattcaaaaaaatatatccacttatgttatcaacaaaataactggatatatatctttaaatccatatctgtatacaaattattccctttttcaagcaccaatggaaaaattataaaaactaagcatacactagacactagaacacaaaaaaaacttactgaattcaaacaataaataaaatagactaagttttctagaacaataaaatgaaaccagaaaatactaaaagaacaaaataaaacacaacttcttagaataacagcaaaaattggctatttaacatacacctgatattaaactaagcaaagaatatgtattcatctttatatcagcttatgggattggagctgatatcattttacagataaggaaactgaagtttaagaacactgaaatttcttactcaagataatatagtgatgcttcccgatcagtggtgaatggggcaaaaaaaaaaaaaaaaaagaacgtagctagtaagtagtagagctagaaccaatcccaggtccatgaccctggagaccaagctcttaactaatgtactcttaaataactgctgggtcaaagaaaaatcactacaatttagagtatactacaataacactacatagcaaaatctatcaaattaagccaaaactatactgagggaaattgaatgctgcttctttaccaaagaaaaagcagaaaaacacagaaagcattcaagttaaaagagaaaatacaataaatctaatgacgggggaaaaattaaaaagttaaaagaatagtgattattagaaaaaaaagtataacagattacaatcaagcacgcatttttaggagcatgaaaaaattataaaattctctattaagaggcatctttaaacttcagtatgaaaattttcaagtactgaaggccgggagtggtggctcacacctgtaatcccagcactttgagaggctgaggcaggtggatcacaaggtcaggagtttaagaccagcctggccaagatggtgaaaccccatctctactaaaaagacaaaaaaattagccaggcgtggtggcaggtgcctgtaatcccagctactcaggagtctaaggcaggagaattgcctgaacccaggaggtggaggatgcagtgagctgagattgcaccactgcactccagcctgggagacagagcgagactccgtctcaaacaaaaaaaaaaaggaaattttcaagtattgaaaatagagaaaatagtataatgaacccaatacaaccatcaaccagcttcagtaatcatcaacagatcactaatctgcttcatgtatacccttattagcttaacaattttaaatactggagtagacaccttaagtgccaatatttcattatgttctacttaaaaaactgtcactcattttctttctgtctcacttaggtacagggtcttattaatctctaactaagggtcttaagaggtaggtactcaatatacactcgccatcagtgacaatgtaaacaaaacatagcactccttactccatattcataatgccataaaaatcaagacagaaaaaaaacaatagtttacctgaacttccatgaacttcctcatcatccacatcattctttccagacattaaataattattattgagcctggaaggtccacttaagaaaaaaaggaaaccacaaaattaatgcttttataatacatatatctaatgtatttgccttaatgatcatttttctcctaaaactgccataagtctttcttataaaaccaatagtgatgttacaagtcatcaaaaatatatagtcatccctcagtatttgtgggggattgattccaggatccactgtggataccaaaatccaaggatgctcaagtcccttatatayaatggtgcagtatttgcatgtgactttcacatatcctcctgtatactttaaatcatatctaggttactgataatacctaatacaatgtaaatgctatgtaaatagttgttatactgtatttttatttgtattattttaaatgtcatattgttactttttattgttttatattttattttctgaatattttcaatccatgggggttgaatcagtggatgcagaacccacagatatggagggctgactgtacttgctgcattaaacaaagactacaatttcatcccataactgacagttgagcatcataagtactgaatttatgacttacagatcagagtaacagacttagtaaattcaaatgataacatcctgtggtgaaaatcaaattataaaaaaagaaagaaatcatcatattttaattaaaaaaaaatatagccaaaaaccaatggaatttaaaatgtggtccagaaattgtcagagatgattcagcctctcctagtcctaaatctctttctacctattatgaacccaggataagcctagtcataacctcacaaatagtaaagaaatcttagccatcccttaaaagtctgagaatttgctaaaatttaccctttattcattttttaaaaggttatatgacatcagatataattaagagtaggtaattcaatttgatcactaaatgtggtcattttaacattatatgtccaaattctttaatacaccacctttcaataggtggagcctaattccacctctccctgaatgtagtgtggactcaataagttgtttctaatgaacagaataaagtagaaatgacggtgtacaatgtcaaagactaagtcattaaaagacactgtgatatccatcatagtcacaccttctcttggagcatttgctttgtgggaagccagttgccatattcagcagctgagagggccacayggttaagaaactaaggtctactggaaacagccagaacggaactggggtctccagccaacagcgatgtgagacattttataggtggattctccagttccagacaagactttaaagggttaaaaccagaaagatgactgctacctcctgagaatatccgagccaaaactagctagctaagcctcccagattgctgasccatagaaactatgaaacaataagtgtttttaagcttttaacaaaattaaaataaagttcttgggtaatctgttatacagcaatgggtaactaatatatacaactattatccttacaatacacgcatacctttcctctaaaactgaagtcttatgctctccagaatccaagtttgactctgttggtatattacatgtatatccactggtctgaggctttaggggaacattctgtgcagtcataatgttatcttcattctttgagcttcttgtagatctataaaaatgataaatgtatgagtgtttatacttcttcaaaataaaattttcttccagaaacgatacacaggtgggtacaaagacaatgtaatattggctataacgaatatcagatcaccctgttcaggttctgagacttgcaactagctaaggaaggaaactggtttctaggacctaccaagagtcccaatttgaaaaattctgatgagagaaatggagaagacacctgccaaggaaggtggtgaaagggacataaggagaccttatctataagcagcttgatatatattacagttaatctatcatggtttactggagaatccataaacaactaaaattggcttctttgatatccctagtcagcctactgaggggcaatagggtcctcagagggactgagctcatctctttggtagttagtttactccaaatatatgcaaacaagatacactcttcctagtgactgtataattcttcaggttctagtatcctcctgggtcctaccattaaagtcaaaagaaataaaagtgattacaagagaatactaggaacaactgtatgccaacaaattaaataacctagatgaaatggacaaactcctagaaagacacaaattatcaaaattgattcaagaggaaacagtctcaaaataccatgaatcagtaatcaaaaacaaactacccatatagaaaagctcaggcacaggtggcttcactgcttttaccaaacattcaaagagaattacgacaaattattcacaaaccgtttcaaaaaatagagagataatacttcccaactcattgtataaagccagtattaccctgataccaaaactaaacaaagacaacagaagcaaagcaagctaccgatcagaacccctcaacaaaatactagcaaattccagcaacacaataaaataaaagagagagaaaagcagagaatggcctgaaaaagtgaaacagaatgggtatgggatttctttatgcactataatgatatacgctaatatattttaggacacactgtcatttatttcagtatatcctcagcaccttactgattccaacacaaagtatgtattacctcaataggttgttggaactaataagaattcattaaaagyatctagcaaatatttggcacatagtatgaactcaaaaaatgttaactattatcatcctaagaagaaaagtattaagctatattcctaactattgaaatcacattaatctcacttaaaaggaaacaatttgaactatacacttaaaaaagattaagacagtaaattttatgttatgtgttttttgtctgtttgttttttgaatctctactttgggagcccaaggcaggagaatcacttcacaccaggcgttcaagacaagcctaggcaacaaagcaagacctcatttctccaacaaattaaaaaattagccaggtgtggtggtccacacctgtagtcctagctactcaggaagctaaggcagaaggattatctgacccagaagtttgaggttacagtgggctatgatcacgccactgcactccagcctgggaaacagaggaagactctgtctcttaaaaaaaaaaaaaaaaaaaaaaagtttaactcttggatgacaataatatcttattaaatttaacagtcataattccaggtgctatgtactattccctattttaatatgaggaaacaagtgcagagtactactttgcctgtgtgtcayccagctaatggtagaggctggatttaataccaggtatgtcagagtgcagagctcttcatgctaattactgcctgtccataaatgactaaatagcacaaattattaaatgctgaacaacaaaagtaactatattgtacacataacagacattacctagaacaatcaagatttttcttcttagccaagtctgcctcatcactttccaatggctcactcagygaacatctggaaatttcatcatgaccaacgatacctccagaaccttcagcatttaaaaacttctgtactctttggttgcctttagttgctgtcttctgccttttaagtggaatagtttttttcctaatattcttagatgactgatttgttttcttagtagattttcggctactattgtgatgcattggtaattcatttcttactgaagaattgctataaacaggacctgaaggattcaatgataacctaaagttagtaagtttgtccagatgatttggctcactgaaataccaacagcatttatatttgcatataaacatatacacatacacacacacacacacacacacacacacacacacacacacacacacacatctcaggctaaatttatttccaaattaaattctttaaacaatgtagctcttcagtttatagatatatgaaacaggcccttcaaatctgtcacaggcttcaagaaacactctctggctctgcccactgcccttctggccatccttaatatctgatattccccaaggtgacagcttcagcttttcactccatatactttcattgacggacttatctacccagagctttaattactatctatatgctgacacctataatatccatctactgctctcccctatatctgcctctcttgctttatttcctatcttaatgaaaaatacaactacctattctatccagatatctaaatcagaaatttgagtcatgcaagactactactcctatccacaatcacgccctaaatcccatcaattctactttattaatgcctttcaaatctttcaagctctccctcctgtcattagtagaagtcctcattatttcatatctggattattaaaacagtctctttactaatctccccctccctagccttgtttttcttcaatccattccctacactgctgcaagaatcacctttggaaaacaaaaactggatcattacaactctgcttaattaaagtattttagttattatctatagcttcaggatgaagtccaaatacttcaacatcaattcatatctacatctagatttgcttatttcataaaccacaattcccaaaacccccctccaaacaaacaaaccaaaaaaagccatcagtaatgaacaatctacagtttctctaaagcactggttgtccaaaggcagtctctagaccagcaagatcagcattatctgggaatttgaaatgtaaattatcatgcctcacctcagaccccagtgaatcaaagactttgcagagcagggcccagtaacctgtgccttaataggccccccagacaattctaaagcacactaaattaaagaaagaaaagatcaagctctctgctccagatctctgcacaagctacttctacttaaaacattccataacttcctccttactccactcaatcacttagctaactcctagttcatccttcaggaarctttccctaatttccaagtcttaggtagcttgctatcacacatacgactgtttacttatctctacttctctcctccagcagactaacaactccttgacctcaagtaattgattggtattttatctatgtatattcccaatgcctaatgacaggggcaggactatggtgaagcaagagtagcctcagctggaaaattcaagaaggtactcattttcaggtctgtgcaagtacagagcccgaactgatacaatcctgtgactgactgccttaaatttttcaccctagtgtctcattgtcttaccctagtcctggtcctactttacctcattcctgccccatggcaagtactccatatacatttcttcatatatatggaagggcaacagtgtcacacgtacgacaggcaggctgggggcaggtcaagttgttcttcttaacttcagacttcagtttcttcttccatcagatgagagtttagactatatgatatataaagattcctccactttttcgactcccagcttgatcaaaaatccaacatctatttcaggactcttaaataagtgttttttgatagtttcagagatctagcacatttatccaagttctgtaagaatttatttacccatctgtttatgtaytcatctgccacatagtacttagcatttcaggcaacctggggcagaaaagtgagttccccaaagcagtaacagtattatttaacacttcaatactaacatatgccacctactatgctaattgcatttaaaccttataaaaactcaatgaggtaatcatgttacagaatgagaaactaaacaaagcaatctactcaaagtggaagagtgatactttgaactcagatctcactccaaaatccaaaggctgcaacaaaataaatacttgctgctatccatcaagaatctcaatgatttaataattcatagcaataaggcctcacatatacaatgccatagttgtactaatcattcacttattaatctaaatgccccaaagtcaatagtatttgtgtatgtgaatgctaccttatgatccaccaatcttttcaggatcactttctttaaaaagggacaattctcccaaaacaataaatgtttcatattgtgcagaaaaaagttagcaaagcaggtctgagtatactacccttaaaagggcctgctttcaaagttagccctgtaaacttaaatttcaggattgttcccgtcatttcctaattggcaaacgtggtgttgtgggcctaaactgcttatgcaaaaaatatggtttaggcaaatattgccttccttcagggagtctggaattgtagtacttgctagatagagagtacctatgtgaccacccccaggaaagatcttgggcactaagtctctagtgagcttccctratagacattttgcctatttgtcacaactcattgctagaggaattaagcagctcctgtgggaatccactgggaaaggactctttaagcttctgctgatttcctccagacttaacccatgcactttttttctactgaatttgcactgcatcctttcactgtaatgaatcacagccatgagtacaactatatgcccagtcctcctagcaaattaccaaatctgagggtagtcttgggaaccwccaacacaagtaatttacttttttatgtgtaataaactataatcttttagattataaactccttggtggcagaacctcatattatcaatctttgtatccctcacagccaggacattaaaatagctggattatttatattgcctttcccaactagaatgcaagctccatgaaagcagggatttctggtttggggttttgttttcccacagctattatccctattcctaaaatactgtatatattaacgcttcaaggaatatctttaccattgatttaatattccttttgatgacccaatttaacttggtcctcatgatattctctatatagaaatataaaatcaaacataatgccccttacagaatgattttgtctatgaacaaacacaatttaaataaaaatacttactctcctctgattttaccacccaccaatcagatggacgcctggaaattcttcgacttttcgtgacagttgaagtcacttcttcaggtacaagtttgttcttggactcactggaaaagcgcttctttttagattcttccttatcttttctagtgctacttttcttgcttcctaaaataaagaaaaccataaaaccaattcacaatctactaaaagagttttcagaaaaccacaagattataaaaaaaccgtcaattacaggaacttcttaaatttatcctgtggccttttcatctccatttttaaaagtcacatgttctctttctgtcaattatatgtgctgctgaagtaagcactaacttcctattaaatgcaaattttcacactgcttgataactcttatatactcctcagccaaaaaaataagtatcttctgaaactgaaaaaaaaatacagttccttcctataacgtcctaagtaaaagtaggcaattactgctttcctgttttgaaataatgatttttttcaacttaagaagaggagatttaaagtgtgattaaattataaactctgaaatagaggcattatcttggatcatccaggttgacccaatctaattatgtttcttttaaaagctgtggtcagagagatgagatgatggaagaagaggcaagataaattcacaacatgagaaggctggtattgctagttttgcagatggtggaggaggaccatgagtcaaggaatataggtagtttcaagagggtggaaaaggcaaagaaacagacttcctcccagagcyacyagaaagaaagaaaaccccaccaataccttgattttatcccagtgagacatctgacccacagaactgtaagataatcaatgtttgttgttttaagccaataagtgtgtagtaacttgtcatatgacagcaatagaaaattaatacaactgatatggtaattaatgagcattatattcactaaccaatctagatacagaatatatgtaaaaattagtgtgtagaatatagcaggtactcagaaaatgtttaatatttacaattatagagcgcatctttcaagtatacttccttcatatgtcttttcctaagaaattatggataaatcaaaattttgtatccttccttttaatcctatgcatgtatgtatattatctattattctacagaacccaccagaatgatcttgttaacagtagaaataatgggttagtaatttttgtgattacagtgcctaatgcagtgtatggcattcaacaactgttagacacatgagtgaatgatggaagagaatggacttttatctctataaaaaatagtcccacggtaccctgggattttttttaacatttttattttctaaataatttatcattctgtcttattcatcttccgatactaacttgtttactagccttttcttttcactttgccctctatatatactgccatctcacaagataaacaaaaactatatgagttagaattaaattatatataaaataaaaaggttctagaaaagaacctataggcttttcaggctctttgttcatttaggtttactttgcctacttgccaaagctaagttaggatattaaaaaacataaaatgggtagaataatgctcatggttatatttaatataaacacttacccacaggtggcatctgttttttggaaacacaatcatttcccatctcttcatgctcttccatatttctgtctgaatttctttgaaattcgtcttgggtaatatgtgatgtatgtatgttttcatctttagactgtcccacatcaagctgttcttcagctggtttagccatgaattttcttctctgtttttgttttatagtccttttgcttctagatggtttttctgcattcttggaatacatttcatattttgtagatctataattatttactgtttcayctatcaaagcataacttgtatccagtactgttttatcagagggctgagatgtctctactgggtgaggtttatgggaatgtttgtcatttgccaaagtcttaggtaatatattatgatgcttttctcttgactttctaccttgaargagtgcagtgctctcagccggggatattgtgcgttgtttcagagaccctgcctttcttggtattgtaatccaagatctactggcaaaactttgatccgactcatcaattataaattcatcctctatcaacttcgtatcatcgggaggacacgaatgaggtggagcagttgccgcatgcctaacaatgggactgaaacagggtgatacttttaacagttcaaaaaaataaagcttttatatttgtttagtaaagaaaataatctaggaaataaaatctaaatttcttttaaactgtttatatatctcctcaattttcccttaatcttacaaatctttccctcctttcacatttctatgtctgttcacccttatttataatagtaatgacatcacaaaaatttagagctagaaatctagacatcaacaaatttgatcccacccacccacccattatatatactaaaactgaagcccagagagatataattataactcagatacattgactcacagtccaaaatgaatgccactattatatataatcttatattaaattatatatttgtatatataacttttggggtctgaatttcttcacattcaaaataagtcaacaagattatttctgagaacactccaagtctaatatttgaatggactactactaaattataaaaagttgaggaggccggatgtggtggctcacgcctgtaatcccagcactttgggaggctgaggcaggtggatcacttgaggtcaggagttcaagaccagcctggccaacatggtgaaaccccgtctctactaaaaatacaaaaattagccaggcatgatggcgggtgcctgtaatcccagctacttgggaggctgaggcggaagaatcacttgaacccaggaggcagaggttgcagtgagccgagattgcaccactgcactccagcctgggtgactgagcaaaactccatctcagacagaaaaaaaaaaagagagagagagagagattggggacaatttcttcctatctttttttacatcccacagttcttcatacatagcaacaccaaatacacagacggttgaatgaatgtaaaaattactaatattactataggactgtaaattgtagacctacagaactataaaataataaaygttgttttaagccgctaagtgtgtagcaacttatgacagcatgtgtgtaaaaatgcattccaagttygggtatttcacatatattttcatattataatcatggtatagaaataaatggagtgtatctagaaaggtagcataagcacaaaagaaatctagtgccacagaaacaggaaaaataaaaggcaagtcttatcacaaagcatacaatgctacagaatgttattaaataatgaagtcaaacaatgtttcccaactctagacctttctccatagtcctagcccaaactttatgtattttactaaaaggcagaaagcctatatcatgaatattattgttatttcccatgcccagtgttgtaaaaggctaaagagtaagacagacaatttcaactacaatcttatggcttataatataacatcaacattaattcttaaattttcataaaagcatgtacatgttaagaacatacaaagagattcatgcatttaatgaggtgttgaataaattaagactagtgcattgagattacacagtacctcctccaattagtcaggaaactttcctagagaagggaggaattattccaaggacagtaatctgatagactgactaattttacatttccctgattgttttaatagctttaagcacaccacatattgcagtgagatacacaaaataaaaaacaaggtaaacatccaaactccaaagctggcatacgcactcgtttccactttttcactaggataagaaggcttagttagctatgtttagccataacagaaacaaagacagaatgcaaaaattagattatgtttttctcttttaattagaacatacacaaggaatcagaaatgaaaatgccttctctattcctctaatcgcaaactcctgacaaatcttataatgtaaaatagcaaatactctaaaaaatatactctctaatggtagagtttcacaaacttatataattagaaaactctataaaaactaataaagaacaaagtcaatacaaatactacaatgaatggatgttaaacagaaatgatatccttaggaaacaatcttgacactatgaaagtttacaatagggaaagatggcttctaattagctacaaaaactatgaaacgctttgtagcatttaggctagatcttggaggatttctaagatttggtcacaaggaaatgcaagaaagacaatcaaaaggaagagcataagtggaagcaatgatgctagaaagcactgggaataatgaatagttatatttgactacaacaattaaacataagatgaactttactcactagagtatcaaaaagaacattaaaaaataatttctcagacattatataattagcccacaagtataacgcatttgtttcagatggtggtgacaatatccatatgaggtttaaaatatacacataaaaataattaatcaactacaggaagcagagactgaacaaaaggggaatttcattcattcatttaacatgtttttataaaaacttcctttttatttttgagactgagtctcactctgtcacctaggctagagtgcagtggcaccgtctcgactcactgcaacctccacctcccaggttcaagtgtttctcttacctcagcctcccgaatagctgggattacaggcatgtgccaccaagcccgactaatttttgtatttttagtagagatggggtttcaccatgttggtcaggctggtcttgaacctctgatctcaagtgatccacccgcctcggcctatcaaagtgctagcattacagacatgagccaccgcgcccagcaataaaaacttcctagtatattcactagcactctgatacctatgatagtgacataagggcagcctaacataacgatttctaaatactgcattgtcggccgggtgcggtggctcaagcttgtaatcccagcactttgggaggccgaggcagatggatcacctgaggtcaggagttcgagaccagcctgaccaacatggggatatcccatctctactaaaaatacaaatattagacaggcgtggtggcaggtgcctgtgatcccagctactcgggaggctgagcaggagaatctcttgaacccaggagggagaggttgcaatgagccgagattgcgtcactgcactccagcctggaagacagagcgagaccctgtctcaaaataaatacatacatacatacataaatactgcattgacttcagtctttgatatcacacagacaaaccagaaggcaatgaaaactgaataaacttgttttctttcaagtctaatttagtatctattaaaaaatggctttgggagtgactcactgactggtaaaaaaccatctctccttacaggtcagaaaaaatttcaattaaaatttttgttaattaaattacttatttctaagttaaatagcattaggaatccttatatatggttcatagaatataaaagaaaaatgtctcaaagggcagtttcttaataactcacctggattcactttttcgttttactgtttctaaaaacaatgttgaaaaactttttttagcttgtcgttgaatttcatattctgaatctcgtattctattctgagatgatcctgatggttttctttcttgtccttcygatgttttatcctcttcatctgatactttattatctatttctattttctttaacataactttatcatcaaagtttaacctaaaaggttaaaaggagggtaagctgaatgctcccgtaacgtttcttgagttataagtcttcctgaactcctttacagagacaatacagaccaatttaaaattctgtactaggcatttatttaagacataaatgctgatttgtgcattccaaatacataagataaactgctcaggaaaattaacttttgtatttatcaatagaaaaacatgaaagagaaaataatggctaaagtatacatcaatgaaatgtatagctaggcaatggttctcagggcaatcttagagcactgtgacagaccaaactttgaatatcaaagtcttagaatatacttaactccttggctccagtaatcatacaatactctaaatagaaattacactcattacagagatctccaaatgcaaaagaccttgaatccactttgtttcctaaaggccaaaggtaaggtcaagaaagagaaaccagctgtccacaaagcatagcatcctcaataatacttatgctctgctaccsttgaagtgacctgatacacatctacacttgcaattacaaaaaatattgagaaaatacaaattgtttctcttaggaagcaatcaaatattatcagagagaaaacacattattccagactatagaaaagttaacctctaaacttctctgaagtacactttaagcccttccttaattattacaaactgaatatatgctaaatgtatactttctcataacatgttaatattcctccttccttagtgtaaaataatataacaagattgaattaccattttttaatacaaaaagtaaaatttttaaagtgcgttaacattatttaaataaaatgttacctttttttggttttaactgaaacctctgtacttgaaggcagcatatttactgaattttcaaaagtgtaagtctctctcttttgggcactagatggaataacattttgtgatacagatgtttttgcatccaaaagaacagaaggtgagccaacggataagtaaaattcttcatcagcttcactgtgatgatcatttatgtttctacttgatatttttttcgagtcaggtgtatttttggaactaacatcagttgccagaattttctgatgaacttcatgggcctgaactagaagaaaattatataaagatatttgtcaattaaaagaataataagagaatcaagcaggctttttaaaaattctgcaataatttaatcagaaatagttttcagaaaactcaaagtcattaagattagaatcaaagatctatgattaaaataagtaagtacttaagattcttctatctttgggctaaaaattggtgacctagggcagctagatgatatatttacacatacacacatggaatatagatataacagatatagagagatacaacataagcatgtgtgtatatatacatacacagtatatatgtatatgaacatttatctataatgagaaaatttaaaagaatgtatccatattctcttaaccctcacccttcagaacgagatggcatttccctgcttctccctctaaatacaactaacttccctggaaattatccatcaatcaacaacaggactctgaaagctggaagaaaaaaaggtagactagctaggaagctcaagaccagaaacagacaagccttaggttttctgtctgtctcccatatacccctggactggttgctagtataacctgtaaccaccaataggtgaaagacagggtggaggctgggtggaaatgcattctctgaacaaggtaaacccaccgaagacctaatgaggaaactcaagccccattcagcactctcggccatggagcactccttactacctgcattggcaaagcaacaaagccctgggctgtgctatgggactgtagcagtaaaggagctcataccaagccagtcccgcttctacaatcatagatggcaggcggtatgacccacatgaagctgtagagtagtgaaacccctgaccytcacagcccaaggcaacattttgatccactgatagtattgacaccccaggccatcccagtccctactttacaaccagggcaccagcagacagtctaatctgaggcaagaacagcgtaagagaggccagcaaccccctgtcctccacccaatgatataaggaaacccaggaccagcagcttctaaccagaaccccacacaagtgaacatggacatcaaaaggcatcttctacccaccccagacagcaccaacaggaactgagctagaatcctaacagcatcagaaaatgaagtagaacaaaataccactattactctgaacacttaactatcattgaaaataaaactcataaaactaggaaagaggggctgggcgcagtggttcatgcctgcaatcccagcactttgggaggccaaaacgggtggatcactggaggccaggagttcaagaccagcctggccaacatggcgaaaccccatctctactaaaaatacaaaaattagccaggcgtagtggcacatgcctgtaatcccagctactcgggaggctgaagcatgagaatcacttgaacccaggaggcggcggttgcactgagctaagatcacaccactgccctccagcctgagcgacagagcaagactctgtctcaaaaaataaacaaataaataaataaataaataaataaataaataacacaggaaagaacctatacattaaaccaaaatagggcaactatgtgctgtaacaaaagatttaagtagtctaagaatcccctaacataagtaaccaaatctcaggaatacaatcaaaacaactcgtcataccaaaaccaaaacaaaccaaaaaaaaaaaaaagtaagaaataatgatcaatagacataaatgagatgaatcagattttaaaattatttaacaataaattttaaagcaaacatcataaaatgctttaataatcaattacaaatcctcttgtaacaaatgaaaaagaaactctcaaagtagcattttttaaaaaaaagttttttggatattagccattatcagtaagtagtgatttttaaatattattttaaattttcctaataacagtgatgtaaaacaaatcaaaactacaatgagatactacatcacacccattaggatgactattatttataaaaacaaaagataacaactgttgatgtagaaaaaaatggaacctttgtgcatgcactgctagtgtgaatgtagaatgacagtcactatgaaaagtgcacagtggatccttaaaaacttaaaactgaaagcaggaactcaaagagatactttcacactaatattcatagcagcattactcacaatagccaaaaagcgaaaacaacccaagtgcccatcaacagattaatagataaaaagtggtatacacatacaatgaaatattacccagtcttagaatgaaattctgacacatactacaacatggatgaaccttgaagacattatgcttagtgaaataagccagtcacagataaattttctgtctgaaattcatggacagaaaaaagtagaatggtggttgccagggctaatggaaaaagagatactgtttaatgggtacagtgtttcagttgtgaaaaatgaaagaagttctatggattcatggtggtgatagcctcacaacaatgtgaatgtacttaatgctactgaactgtatactcagaaataaagtggacaattttatgtttatattatacaatattttaaaatacacttctttaaaaaagagcaaaggaagtgacgtgtgtatataaacaaactaaaacaaaaagtcttgtaaagttaaaaaatattaaaatacctgacaacagaaataactaacagtagtatttaagttgggaattcgttgtttcagttaccatgtctgcataatataacttcttaacttggctgcataaaacaactatttgttatgttcatggattcagtaagtcagcaattcagcagagcacagaagggacggattcttccatgaagtctgagccctggaatcatctgacagcttgtttacacatatttgacacctggtcttgactgcaggctgggagtcttttctctccataatggctactttgggcttcttcacagcatattgtctgggttccaagggcaactggagagaataagaaagacaggaagagagagagagaaggagagagagatccagcatgccaagcagagccatatagccttttatgacctaatcatggaaatcacatgtattacatatgccacattcaatgtatatgtagaaacaacctcaatgaagtggatggggggaaaggtgatgacctaagaaagatcagaaatgaatcaaaggccaggtgtggtggctcatgcctgtaatcccagcactttgggaggccaaggtgggtggatcacctgaggtcaggggttccagatgagcctggccaacatggtgaaaccccatctctactaaaaatacaaaaattatgtgggcgcagtggtgtgtgcctataatcccagctacttgggaggctgagacaggagaatcacttgaactcaggaggcggaggttgcagtgcaccaagattgtgccattgcactccagcctgggtgataagggcaaaattccatctcaaaaaaaaaaaaattaaaaggaatgaatcagctgggcatggtggctcacacttataatcccagccctttggaatgctgaggcaggcggataacttgaggtcaggactttaagactggcatggctaacatgatgaagccccgtctctactaaaaacacaaaaaattagatgagcgtggtggctgctgcctgtaatcccagctactcaggaggctgaggcaggagaattgcttgaaccctggagtcagaagttgcagtgagccgagatcacgccactgcatttcagccagggagacagagggagactctctcaaaaaaacaaaaaatgaatgacgtctgtaagactgaaggcaaaagaaactgtacataagcactattctctagttgataaaactgttttccacaggatatgagtcaacaattctgacactcttttacatgtatacagaaatgtaaaagataagtaaatggatgttgaatggtgaacgcccagtttctcattcatgtaatgggagtttacagataagcaagaggaggaggctagaataatccacgtggtaatggattagagtcagagacatcaatatgaacttatgattacttcaacatagatacagatagttacatttaaagatatttataggtatgtgttgatacacaagttattgtacacacacatacatttacccagctctatcagttgaaagggtctagcagcaacaactctacaggagtgacagcacacctagcactcagatcttggtttctaataacattacccagtaaaagaaatcatgattccatgaagaaatggttgattctgggatggggcaggagagcatcttgtggctctaaaaggtatgaaagtgctcagaaacaacaacaaaaatgggccatgtcaaagggacactggaaccaaagtaagagcttctattagccaaatctgcaacaatctgaataacaaaataaacagtaatgaattataaagtagaaaataaaatttatccatcaagaaaagaacaaaataaacccaatcaagcagaaggatgggaaaaaataaagagcagaaatcaataaaactgaaaatagaaaaatayagaaaactattgcaggaaaaaaaactayaaaatgataaacctctatctaacaaaattgacaactataagaagacaccaaccatcaatatgtggaataaaataggggatgatgtcacaatagattttgcagccaccaaaaatagggtaatgcttctgtttgaaaactggcacgagacaaggatgccctctctcaccactcctattcaacacagtattggaagttctggccatggcaatcaggcaagagaaagaaataaagtgtattcaaacaggaagagagaagagaggaagtcaaactgtctctgtttgcagatgacgtgattgtatacttagaaaaccccatcgtttcagtcccaaaactccttaagctcataagtaacctcagcaaagtctcaggatacaaaattaatggcaaaaatcacaagcattcctatacaccaataacagacaagcagagagccaaaacatgaatgaactcccattcacaactgctacagagaaaataaaatacctaggaatacaacttacaagggacgtgagggacctcttgaaggagaactactaaccactgctcaaggaaatgagagaggacacaaagagaaaaaaattccatgctcatggatatgaagaatcaatayagtgaaaatggccacactgtgcaaagtaatttataaattcaatgctactcccatcatgctactattgactttcttcacagaactagaaaaaactactttaaatttcatatagaaccaaagagcccatatagccaagacaatcctaagcaaaaagaacaaagtggaaggcatcacactacctggcttcaaactatactataaggctacagtaaccaaaacagcttggtactggtaccaaaacagatatatagaccaatggaacagaacagaggcctcagaaataacaccacacatctacaaccgtttgctcttcgacaaacctgacaaaaacaagcaatgaggaaaggattctctgtttaacaaatggtgctgggaaaactggctagccatatgcagaaaactgaaactggaccccttccttacaccttatacaaaaattaactcaagatgcattaaagacttaaatttaagacctaacatcataaaaaccctagaagaaaacctaggcaataccattcaggacataagcatgggcaaagacttcatgattaaaacaccaaaagcaattscaacaaaagccaaaactgacaaatgggatctaattaaatgaaagagcttctgctcagcaaaagagtgaacaggcaacctacagaatgggagaatatttttacaacctctccatctgacaaaggtctaatatccagaatctacaagaaacttaaacaaatttacaagaaaaacaaaaacaaacaatcccatcaaaaagtgggcaaatgatatgaacagacacttctcagaagaagacatttacacagccaacaaacataattaaaaaaaagctcatcatcactggtcattagaggaatgcaaatcaaaaccacaatgagataccatctcacaccagttagaatagtgatcattaaaaagacaagaaacaacagatgctggcaaggatgtggagaaacaggaagacttttacactgttggtaggagtgtaaattagttcaaccattgtggaagacagtgtggcaatgcctcaaggatctagaaccagaaataccattcaacccagcaatcccatcactgggtatgtacccaaaggattataaatcattctgctataaagacacatgcacatctgtgtttactgcagcactatttacaatagcaaagacttggaaccaacccaaatgcccatcaatgatagactggataaagaaaatgtgacagatatacaccacagaatactaagcagccataaaaaagaaatgagttcatgtcctttgcagggacatggatgaagctggaaaccatcaacctcaacaaactaaaacagaaaaccaaacactgcatgttctcactcataagtgggagtagaacaatgagaacatatggacacagggagggaaacatcacacaccagggcctgtggtggggggagggaggaaagggaagggagagcattaggacaaacacctaactcatgtggggcttaaawccaagatgacgggttgataggtgcagcaaaccactatggcacaggtgtacctatgtaacaaacctgcatgttcagcacatgtatcccagaacttaaagtaaaaaaaatatttaaaaaaactcaaaaaaaaaatagggtagtgctatgaacaactttatgcttacaaacttgacagatgattagaaaaaatggaccgatacctcagaaaacacaaactaccaaaattcagtcacaatgaaattgataatcaaaatagtcctataactattaaagaattaatattgctatttaaaagttcttgaaaaaaaaatctcctggaccagatgatttcaccggagactgttacaccaaatagttaaaggattaacaccaattttacacagttccttccagaaattagaaaagggaataattcccaactcatttaataaggcaaatattaccttgataacaaaaccatacaaacacagcattaaaaaaactataaaccaatctctccttacttaaatacaaaaatcctcaaaattttaccaagtcacatccaacaatgtataaaaaatagcaatagtgcacaataattgacatttatagataactacacccaacaacagaaaacattttttttaaatgcccattcataaagacatgcaatatcttgggtcataaaacaaatcttcataaatgtagaactgaaattgcacagtgcatactatgtcataaaggaatcaagatcagaaattaataaggaaaagataatatgaaattaccaaacactggaaaattaacacacttctaaataaccaataggctaaactctgaaaagatatttaaaaatacatcaaaataagtgaaatgaacacaaaacatgagatacaaaacctgtggaatacagctacaacagtgctgagggggaaatttatgccaaatgaatacatttgaaaagggaaaaagagctcaaatcagtaatacaccatgaccacatggaaattttacgcaaggctggttaaacattcaaaaatcaatatgtataagccaccatatcaacagttcagagaagaaaaatcatatgatcatatggatttatgcaaaaaatgcatracaaaatccacattacctatgattaaaaattctcagcatactggcaggagaaaatttcccaaccctataaaaaacatctattaaaaacttatagctaacatcttaatgtgaaagatcaaatgttttctaagagcaggaacaacgctagaattttcaccccatccttttttttttttttttttttttttttgagacagggtctgactctgtacccaggctggagtggggtggcactagcacagttcattgcagcctcaaccttttgggctcaagtgactctcccacctcagtctcccaagtaggcaggactataggcacatgccactgcacaagctaaatttttgtgttttttgtagagacaagttctcactacgttgcctaggctggtctcaaacatctggcctcaagagattctccaatctcagactcccaaagtgctggaactataggcctacgccacagtgcttggacccatcactgttatttaacataatactgaagtactagctaataatagtaagaaaaggaaattaaagacataaactaaatttaccccaaactacccacaattattattttaagtggcacagtactaatttcagttaaaatcatagaacagacatggatacctaatatcatcattattaaacaacactgactcagagattctagcaaaggcaagaagactgaaataatcagattaaacataacaaataaaacctctctttagctgatgacatggttatatagcttaaagaaaactaaaagattcaaatttttaaaggtctagaattaatttttttaaaaaccttggtaagtgctgaattaaaattttgatataaaaattagcctcataatttaaaaaaatgttcagaatagtacaaaaattatagtacagttaggattaaccttaacaagaaagtcaaagacccaatactaggagggaggggagaatggggagccaggagacaggctttattaaaatattttttatgataaaacatgaaatttacaatattaaccatttatgagtgtacaatttaatggcattaagtacattcacaacactgtgcaaccatcatcatttctagaactttttcatcatttcaaacaaattctgtacacatcaaacattaaatcaccattaccccctaccacaatcccctgcaacttctattctgcttcctatctctaaatttacctattataaatacctcatgtaagtagaactacaaaatttttgtccttttttgtctggtttatttcagtttgcatgttttaatgtgttcaagattcttctatgctatgttatatagcagaactttgtttttaatgactgactaatattacattctgtgtataaatcacatgctgtttatccattcatctgttgacggacacttggcttgtttataccttttgagtattgtgaataatactgctacgaatattagtatacaaatgtctgcttccatccctgctttcaattcttttgggtatatacctaggagggaagtattgggtcatatggtagttctatgtttaactttttgagcaactatcaaattgttttctatggtggctgcaccattttacattcccaccagtgatgcatgagggttttaatttatccgtatcttcaacacttattttcctttttttgttttaaataatagctaacctagtgagtgtaaagtggtatctccctagggtcttgatttgcattctctaatgactgaagatttcaagcatcctttcatatatttattggccaattgcataccttctttggagaaaagtctatacacagaatgtaaagtcctttgctcatcttttatttgggttgtttggtttttctgttgttgagctgtagaagttctttatatattctgattataaatctctatcatccttttcaggtaaattatttgcaaatattttcgcctagtctggttgccctttcacactcttgacagtgtccttcagatttatttatttatttatttatttttggagacggggtctcactctgtcgcccaggctggagtgcagtggcgcaatcttcggctcactgcaacctccagctcctaggctcaagcgattctcctgactcagcctcccgagtacctgggataacaggtacttgccaccacgcctggcaaattttggtatttttagwagagatggagttttaccatgttggccatgctggtctcaaactcctgacctcaactgatccacctgcctcagcctcccaaagtgctgggattacaggcatgagcaaccactcctggctccagattaacatttttataagaaagaaacataacttattttgtaaaaaacctaaataacataaaaaatgtgaattctcacgaaattactacataaattaaatgcaattctagttagaattccaaaagtttatttggaattggataaaactaaaagctcatagaaagaaaaaaggctgcagaatggcagtggaatagtgaaggtatttatatcaggacatactatgaagctactattagtaacaagagtattgtgttgacagaggaaaaaacaaatatatcaaaattcaaaagtatgttgaatgttatgtgagatttaatatataataaaagtagtacattcagaagagaacagatttttttttaatttaataaacagatctgacacaactgaccaactggaagaaaacaaacttagaagattatgtcatgttacataccgaaacacattccmgatggttaaagacttaattttattttttaaaaaaaggttttcagatgaaaaatctaagttgggataagacagaacttttaactaaaacaaacttaaagctataaaagtcacacatttaacaattaaaatccaacagccaataaacataaaggtgctcaaactctggcaatcatggaaatggacactaaagtaaaaaggagattgcttaatatcaatgaatgggcaagaacgtagaatagtaaatagactatcaggtaaaaggtactcttacactattggtgtaaaaggaaattataatagccttttctgaaagcaggtacaggcacagacacatacaaacacacatgcttttttttttttcatttatgggcaccaattaaggtacagaactatttaaaggctacctcagcagaatgataggagtaatgactaaattcttattttaaacctttattaactcaatggagtaacactcttttaatctgaaaaataaaaagaaagaaaactttaaaaagtagtagcatgtatcactgactaaaggaaatggagaagaagagagaaaaagagcactgaccatggagttgtaaggaawtcaaaaacaaattcatccatttcacaattcacaattctgtctaggctgaccctgaccttcatactcaaagcaacacatgcaccattagcgtttctcattttttaaatatatccaagcaaataatgcccatggagatgscaccaacctgatctgtttgtggcttcacttggttctacaacaaactgtagagaggcttctttcttctttgaagaaactggaactgactttggatgtgatttctggcactgagcacagaagaaatacaacattagaactattttattaacttaccaattcaatgaaatatatttgttttttaaatggggggaaaaacaagtattctaaaacaacaaaccagctgttaagagttttatactactttttattttatttctaaagtaatagctactttggaaaacaatctggcattattcagtaaagctgaaatttcatacaacctatcacagaaacaatattactctaaacagcaactatgtggacagaagactgaataaacttattaaataaataaattatagtatagatataccatattacatacgtaacaatggaacaaataaactacaataatataaattattattttaaccagaaaaaaaagcaacctgcagaagtacataacaatcttatctatgtaaagttcaaaatagacacgtaaaacactgtagtattgagattcactctgcaggaaagagttaacataggaggcctgatatatttaaaggaccagcttacagggctaccccttggttggcatctggagacttaacttttagaatgttccctccattaccaacagagaaggttgcacctgctgcgccagcctgcctagactgtttgtataaataaacactgtgatctgtggtgaacatctgctttctttccttctgggagtgcgtaaaattttggtaggcaggggatgcctatgggaccaacccccagtgaaaacaggctgagtttcaaaaggcttctctgaggagaaaaaatgtacacacgttactgcatttcactgctgaagggaatgagtacattctatatggccccttgrggaacacaggaagcctatatatggattcctccagactctgctaatgcgcatttttcccttactgacccagctgtgtatcctggctgaatgactataataagtatcagtcatgaaaaacaccaaaagcaatggcaacaaaagtgaaaattgacaaatgggatctaattaaactaaagagcttttgcacagcaaaakaaactaccatcagagtgaacaggcaacctacagaatggaagaaaatttttacaatctacccatctgacaaagggctaatatccagaatctacaaagaacttaaataaatttacaagaaaaaaatcaaacagccccatcaaaaagtgggcaaaggatatgaacagacacttctcaaaagaagacatctatgcagccaacggacacatgaaaaaatgctcatcagcactggccatcagagaaatgcaaatcaaaaccataatgagacactatttcacaatagttagaatggcaatcattaaaaagtcaggaaacaacaggtgctggagaggatgtggagaaayaggaacacttttacactgttggtgggactgtaaactakttcaaccattgtggaagacagtgtggcaattgctcagggatctagaactagaaataccatttgacccagccatcccattactgggcatacatccaagggattacaaatcatgctgctataaagacacatgcacacgtatgtttattgcagcactattcacaatagcaaagacttcgaaccaacccaaatgtccatcaatgatagagtggattaagaaaatgtggcacatatacaccatggaatactatgcagccataaaaaaggatgagttcatgtcctttatagggacatggatgaagctggaaaccatcattctgagcaaactattgcgaggacagaaaaccaaacatcgcatgttctcactcatagatgggaattgaacaatgagaacacatggtcacagggtggggaacatcacacaccagggcctgctggggggtagggggaggggggaaggatagcattaggagatacacctaatgtaaatgacgagttaacgggtgcagcacaccaacatggcacatgtatacatacgtaacaaacctgcacgttgtgcacatgtaccctaaaatttaaagtaaaataataatttttaaaaaagcaaataaaaataagtatcagtcatgagttcaactatatgtcaaatctcccgagtccttttagtgaagcaccaaatgtggatggtagtgggacctctgtcacaagtggtagcagaagtgtggacacagtatcrgcacagtagagaaataaataaatgacagacttacatggtttgcctgtgtccccaaccaaatctcaatttgaattgtatctcccagaatttccctgtgttgtggaaggcgcccagggggagacaattgaatcatcagggtcagtctttcccatgctattctcgtgatagtgaataagtctcacaagatctcatgggtttatcaggggttaccacttttgcttcttcctcatttttctcttgccaccaccatggaagaagtgcctttcgccctatgccatgattatgaggcctccaagccatgtggaactgtaagtcaaattaaacctccttttcttcccagtcttaggaatgtttttatcagcagtgtgaaaatggactaatacactacactgctgttgagtgaccacagtatggaattcaatgccataaaaagacagaggcaggctttcattttatctctgctctctcttaacatctcattaaagatttttaaaaacaaactcagaaggatgaagagagagacaaaggagtagatgagacatgtcagcaaacatttttaggttgaaaagcaaactactggtaattcagcaacccagagagaatggaaacatgctagcaatggagaaaacccagaagcagacagattactgtttatggagaaacctataaagattagtagaattgcaagacaccactaaaaaaaaggggcaggccagatgcagtggctcacacctgtaatcccagcactttgggaggccaaggcaggagtatcacttgaggtcaagaattcaagatcagcctgggaaacttagcaagaccacatctctgtgtaaaaataaaaaattagccaagagtggtggtgcatgcttgtgttcctacctactcaggaggctgaggcaggaggatcacttgagcccagaggtttgaggttgcagtgggctatgagcatgccactgcactccagcaacagagcaagaccctgtctcaaaaaaaagaagaggcatgcaaacagagggtgytaaaagcgtgtatagttgaatgtgtcttttgtcgcagaaaaaaaattgtgtatagcaagtagttaaactggctgggcgcagtggctcacacctgtaatccccatactttgggaggctgaggcgggtggatcacctgaggtcaggagttcaagaccagcctgatcaatatggtgaaaccttgtctctactaaaaatacaaaaattaaccaggaatggtggcaggcacctgtagtcccagctgctcgagaggctgagacaggagaattgcttgaacccgggagrmagagattgcagtgagccgaaatcgtgccacygcactccagcccaggagtgctttttctcaaaaaaaagaaggtagtaaaaccgaagagcccctcccaaacctatcagaagattatttactctcttgagtttcttaatcagagagactgtgatattagtggcataagacacaggtgaagttaagggcaatacatgaaaaccagagatattaagtaggagcatttaaactgcactttcccctttgccacatctgactgaaattgaaaacaatcgcagttagacttgaaccgccaagcgggaaagatttctttgtcagaaatacttactaggccaagagaaaagaaatctacagatattaacaccaggataccaatgatgaaatggaccaaactacaccacagtgacatccaccagtctacaaattttactaggcatatagagcttccaatgtgttttagtttcccactttcaaacaagaggagacagctaaggatcactggacatatgaaaaaggcgaggtaatgagcaaagtaagtaaaaaaggtacttgcagaaaacagaaactgaagaaatayttatgaaaagggttagatgaacctaatgtcaaggaatataataaaaatttagatcactaaagacagatgacatgatcctaaaagcctgcaaagaggaaaaaaatagtcacaaaggatcatggaatcacaacagtattctcaacaggagaagctaaaataaaagaaagcaacatttgtaagtctaagggaaaatacacctgactaaaagggaggcttgatatgaaaaaatatatattattttttaattaaaggaaaataatttctaatctagaattctgtactcacccaaattacccatcatgaaggtaaaaccatggtatttttaaacaattaaggtctcaaattctcagaaagctactaaaggatgagtcccaccaaaaaaggagaggccaagaaaaaaggaagatttcagatccaagaaataagagttgcaattcaggagaaaagcaaagggactctctgtgatacagagagagtacatgacaaaacctatgtgataggtctaagggtagattgaagaaaaaaaaaagagcagggacagcaaagctgaaaatgataawttaatgtgtctatgcatactaagacatttatacttagacgtttgtcatagaaaactggtgatgaattagtcacaggtgcacagaaagtcaaaaatggaaaaaccaaaattaaatcaagagaaaattaagaactgtacataaagaaaatttaaccattagtactctacatagctgtgactactgaaacagtcataataataccataaacactaactactaatcctactaaaaattatgatgtactaaagaatggaagtttatgtgttgtggtcggaagtagaaactatatgacaaataaagtctaaacttccatagtagaaagccaataaataatagcaaagactggraaaaaaaatcaagaaacagcaatataaacattatttagaaatatggagtcaaaatacctagagtaatagctaagactaaaaagttggacttggaggaggaaaagtggggtctactatttttttgtggaatttatggaactactttaacttccatgtacataatgcctttgagctttaaaaatcaatcttccaacaaattaagaagaaaagtatgtaaaaagatagggaagaraataaaatagtgaaccagaatagactgctgattctttgaaaatgttaatgacagaaaaatacctgtaacaacacagataatttaaaaaggtgaaaaccagcaataaaaagagagtaataactatgaggaagatcatgaagttgactatacacaaattgagaacagaggaaatgtttcaagaaaattataaaatgtcaaaactggcaaaagaaatataaaaaatgcaatagatcattgaataaagtggtaatcacacacatccccaccaaaacagctccaaccatatgttttacaaatgatccaaatttgaagaaacagatcatttttgcttaatcaagttatcccagaaaacagaagagaaaaactaatttatttcatgaagctcggttgtgtttcagttaaaacctacggagtcatatcttattttacttaaagacaaacaaatatgaagtaataactagacctaggaatctcaagttcgcaaacagaaaagcctataagatagataagtcttaagtctgattttattttcaaatcaagtaaacaaatttcattccttatgtggaaggcctaggccaagcttgctgcatggaaaggccctacctgaaaaaaaaaccctaacacctacaaagtctctgttgttttgaagcatccatctcaaggattagaaaaaattaataatataaaaataaaaataaagaatatatgaaaaataaaattaagaaaaaaataatgaaactaaaaacaagcaaatgagaggaccgacaaagccaaacttggttttctgaaagaccaaaattgataaaccctgacaaaattaatcgatgaaaaagacaaggcatagcaggcacagtggcatgtgacttacgagcagtaatcccagctattccttagcttagggaggatcacttaagcccaggagttctaatccagcttgggcaacataccaagatccctacctctaattaaaaaaaaaaaaaaaaaagataaggcataaataaccaatgtcaggaataaaaaaggggatataactgtagatcctacagacattaacaagactggaaaaagacatgacaaaacaacattatccaaataaactggaaaatttaaataaaatgaacaaatccctaaaaaaagaaaagtagaacatttaaaaaaaatagaaaatctaaattgtctactgaaactrttaagtaaaatctaaatctttaatgttctatatcatcatctaggtagtagttgtaaaaattcaatgaaatatacacgcaatttgtgtattttaatgtattatgtttcataagaaaacaaaagtgaggccaggcacagtgctcatgcctgtaatcccaatgctttgggaagctgaggcaggaggattgcttgagcccagaagtttgagacaagcctaggcaacacagtgagaccctgcctctgtaaagaaaaattttaaaatggccgggtgcrgtggctcacacctgtaatcccagcactgtgggaggccaatgcaggagtatcacttgaggtcaggagtttaagaccagcctggccaacatggttaaaccccatctctactaaaaatacaaatattagccaggtgtggagatgggcgcctgtaaccccagctacttgggggactgaggcaggagaatcatttgtaccccggaggcagaggttgcagtgagccaagatagcaccactacactccagcatgggtgacagagcaagactttgtctcaagacagatagatagatagagaaataataaataaataaataagcaggccagcatggtgatatgcacctatagtcctaggtagtcagcaggctgagacggaagggtttgagcccaggaaaagttcaaggcttcagagagctgtgatcatgtcatggcactccatcctgggctaaagagtgaaaccctgtctcagaaaataaataaataaataaataaattagtattttaaaattctcgcaaagagaaaackcctatgaattccatcaaatatttgagaaagaaacaatagtggttcataaaaacacttcaggagaaaagagacagagaaaatactgaacaactcattttacaagaccagtacaaacacagagtagaacctttattttgaacatttcttatttattatacatttaaagttatgaattccctctaacactattttagctaaatctcacaagttctgataagtcatattattatcttcattcagaatattttatattcccaacatgctttcttctttggcctaaagtcatttagaagtcattgcagtggaccttggctttagagcacaatgtcttaaaagggaccagatttaccctcctgcctgaatcaattttaaaaaaagaaaaaacatacaagattctcaagaaatacgacattgaaaaaccaaagagaatgattcttgagatgggaaacaaatgaggtgaaccctctgatcacccatttccagatgtgacacacaggggaaatcctcagttgaggagccaaagctgaggattcaggaagaccaaagtggttagaatttgcaggataaagtactggacaggagacggttacatagagaaaactgcagaatgtgcagatctctctcaagcattcaatcaaatattgatcagagaatgcgttgtaagaaaaccagagaaagaaccacccgaagccttgagggggaatatcctcccagttacaaaggacctagaataatctaccagccagagtggaaaacctccataagtaacgggacacagtagagaagaattttgcctcagaagggaagaaaattagccacagactatattttgctagtctttattgtttccacagcttctcatatatctaaaatttgtttccattttttaaaatagctgctttagcaggagtgttagccttctgtgacttactgcattctacctagaagaggaacctctagcataaccttgataccaaagccctgtaagaacatttttcaaaaaaagacaatattattcataaacatagatgcaaacatcttcaatattaggcaaacctaatcaaaaaaagttaatactttatgaccaagtcaagtttatcccagaaaacctaaagttgctttaactttcaaaaaccattgtaatttatcaagtttcagaaggcctctcaattctgaaagaaatggttttgtctgcattgcttggaaccaaaaggctacatatgtttaatatgttgattgccttttacagttttctagtaagtgttacttctagcactatatgatttttctaattagtattgtgcttttgaataatttgccttagattagcttcaaatactttatttgaaagtctgctacttagtatagttaagtcaaccaatactttatttctgatcaaactaacagcaattaaaatatataatcaacagaagattgatttccccgtataacaatgaagtgccttcatttattagaatataaccaaccctgccaacctgattagcaactttgatcactgcccattttcctaaaaacctaatttgagtattattttaggagaagtgaaaaatgtttattataatttgataattctaattcccataatcccaattccaacagaaaatatcaaataaaacttttcacaaaatacctccaaattttayagaaagtcaatgggaatatagaattccctttcaagaataagacttacaaacaactaaaatatacatgagtatattgtgtataccttcattcattaaaatattaaacctataccagctcttctttatcacttacctctttgcttggtgactgaatacaagtgtcttttattttgcgtgttgaattaggcactgattttgtagaatttgtactaaaatcattggcaagacctaaaacaaaagtatgaaattttcaaaaacaagatatagtgtaatatctattagtcacaattaaaagtagctgtatatgacatgtgaagaaccatctgttgactcactgaccacaattagcttaaatcaagtagagacctcaatttaatattcaaatgttcctgagaagcatcaggaaatgagaaaagcaaacaaaacacctgaagtatcaatatatgccagctcttctttcagagcttgtatagaaaacattcttttctatcatctgcccctatttctttggctggcttattctcttattccaatacctgctgatgctaatcagcacttggaaaagtttttgctgtaatttatgacttccttaaacagatatgtaaatcaccaaagattatctcaaattctccagcgattccaagaattctacacatctattttcattatatattttttctggctagatgcagtggcttatgcctgtaatcccaacactttgggaggctgaagagggcagatcactggagggcaggagttcgagaccagactagccaacatggtgaaacctggtctctactaaaaaatacaaaaattagccaggcgtggtggcacacacctgtaatcccagctacttggaaggctgaggcacaagaatcacttgaacctgggaggcaaaggttgcagtgagttgagatagcaccactgtactacagcttgggtgacaccgcaggactatgtctcaataaataaataaataataaaatactttttcttgtgtatgataattatgtatggacttccagattacagtaatttaatgtgaactaaacgggatgacaaattattgtcaaattattattttttgtcagtattatcctaagtataccagaaggtacacaaaggattgcatatgaactcaaaataccagggaaaatattttccatatatttaaaccctagaacatatttgctgcatttgatattaattaccatgacaaattcatattttcatccatctaacccttaaattccatcttgaaatgaagccttacttttttcttcaaaacagtcttgtaagatttccagaacattctggccttgctctgtgttaatgtcacgtgccctaataaaggaaaaatacagcctgtcattttcagaagatatttctttatattaccatctctttgaaaattccacatctcattataaaatataaatttacttaatatgtaaaatrtctttactatttgaagacaaaacaagtacttgagggtctatacattccctcaagtgaactctttccttcctaataagaattagtatatcataatctaccttaacaattaatatttcttagttgaacagccatgtctaaagctgttttagattactgctgtatctcaaaaacacaaatttttttgaatgaatccaatcagtcctgaaatgcttctttaacagactttacagtcacatctccaagtaacatattcctccctataaattctcaaatgcatttctaattcagtatcattgattaatcttaacagtttatgaatcagtataaattttaattaaaaattatattgagcttgtagattcacagccagctatacaacataatacagaccccttgttcactttacctagttctcctcagtgctaatattttgcaaaactatagcatattatcacaatcaggatactgatattgatacaatctaccaatgctattgtgatttctccagttctacatgtactcatttctgaacatactcatgtttgtgtgtatatatacaaaatgtatcacatctgtaggtgcagataaaacaaccagagtcaagatactgaatagttccatcatcacaaagatcctctattgtccttttgtaatcataaccacctttctctcatctccttcctgcctcctctcattcctaacctctggcaaccactaatctgtcctccatttctaaaactctgtcatgtggaaacaattatatgtaaatagaatcatacaacatgtatcctcttgccttggcttttttcactcaacacaattctatggaaataaatccaagttgaatgtaccaatatttcattgctttttagagtcaagtaatgttccatgctatgtgtgtaccacagtgtttaaccatttacctgttgaagaacatctggatttcaatcagtataaaattgacatgcatctctaacagagtggacaaacttttgcttaaagggccagatggtaaatattttaggcttgtaaaccatagtctctgtcacaaccagtcgactctcccattctagcccaaaagcaaccacagacagtatgtaaacaaagaggcatggctgtgttccaataaaattgaaataaaacctgtgacaaaacatttggctggcctatcagccagagtttactgatccctgatctacaacattcctattattgagagctggaaaagtactatatatgcagtaattaaaaactgtgagccacagtgcattatcaggtcatccatcataaagttttataactgaaagatctcagaaatcatccagtccaataatcatcatccaaatagatgtgtaaagttacttttggagctttgcagaaatacacttaattggtcacttcccacaaaccaatttaattagatttcctagggtgatggaggtaattctgatgtgcaaatctagttaaaaacccctagctgaatcctatgccctcattttgcagataggcaaactgaaacccaaaatggtcaaatggcctacctcagtttgtaaacctaagtagtattagtggccggttttctaccagaatatatataggtgactattataaattctggccttgacatcaccccaaaataccacctacaggtgcacatattgcacagctataaatacactcctgctattacctgtttcaaggatgagatccaaaaagatcagatttgccaaggtgataatgcagagtcactattagaacgcaggtcacattaggcaacagctttttcaaaatttatcaaattcgtcttttcttcccctttgtcattattaccttagcataaaagcacctccaccatgtgtagattactacaacaccctccttaagctactttgtaaacatcaaacatctttgcttttttaaatgtgtgtgtgtgtttatatcagatagcccttattccacagaagatttaggagagcttattcaagcctataatagatgcctaaagcctaacatatccattttatggctcaatccaactcatatggtcttgttttccacttctacccaacatattcaaccttcttaaatcaggtctctctgctactgacaaatatatgtattcctactttggttccttcgttaagttactttctatgtctggaatatactttatcttagtctttaaatacctgttcaaggtccaccaaagttacactacaactttaaagcttttcttaatatcaacaacacacaaatccctaatttctcacatggctgtctatactgcaagttaatgcctaattatatataggcctactctctatgatacacaagtcattacttcagtattgcaagtaataatttttgtccattaaattgtttcacaaatgtacatatacattttcccaacagaaatctaagcttcttgtaaacaaaagaacatacttctgtgccccattggacctactaaaatcacagctcaataaacatgacgttattcataataacatcttcacttttaaaaacatgcttttcatcctattactagtaaatatttaactagaaaatttactttttacaggttttacaactaaaagaagaaccaaaacaacccaaacaagcactcaacaaatgcacgacagcatgtactatttttctttttgccccactgaataagctacatctttctaattttaccatttgattcattctacaaaatgcttttcccatggcagtcacttagtcagaactgagactccctcttcctggttccactattttatcaggtgaatttcttttttcacagccacaaagtcattgcactgcttgcattaacattcccgttagtataagatgactacccttaatcagtgggcacagaaatcattatattagtcagaggtgatagtttttcctttcttcatttaaaaatctattaacgatgagaataaaaataatcttaaaagcttaagtacgtaaatcacctggaaggtcgacaaaatcttcttctgtagccatttttgagatgatcctgaaagaaaagtaaatcatcaatttggtttctttaagatagagtcgagtaaaatttattttcaaagtaacttcatccagtatgggcatgctatacaccaaacatctcctaagggctcaaaacaattttgaggttatgttatgacataacataggttatgacaggcatttaaaaactgaactgcaggcatctggtaagctttattccgcttctctccccacagtgagaatggctttattgctttcttctgattatatataatgtaaacaatatatgtgctcatagtaaaaagtatagattatattattctttcatacaactctttatgtttatatgtataacgtcacataatgggagatcatcgaagctgaagattttcttagaaggggagataaattagaaaagaaatgatacggatttttatatagtaaccataaccaaagtatgaaatatagaatagtgaacaccaaagaagtccagaaatatgtaaacaaaatgagttgtcgcccccattagtcattcacagcttgtaccttttaactgatagctgtctttcagaagagtttgtcaataacatatgctccataaatcagcctcaagaactgcataaaaggccaccattttgacagaagaactgaaaacgtcaaattatttcgagacgtacttgttacataatctgtttctcccaactaccaagtgtgacgcaaagacacacttttaaggcgtttcaatacttctaccatggggagaaaagttatttggaggcctaggaactggagctagactaaaaagcagaagccaagatcgcgccactgcactccagcctgggggacagagcaagaccccgtctcaaaaacaaaaacaaaaaaaaacccagcagaaatcacaagcacctctcaagagtaagacgtaggcacagacgaaatgacgacatgaaaacttaagaaataataaaagtacagtaaattaactctggttatcgacacacgatcacacttgatttcaaaaattcctgcggctttcccactgaaatccctcagagatcacagcctcagcctagcatttccttctccccagcctcgggcgcccgtgccccagccagccgctcaaccactcgcctggagcggggggcctgcacttaccagaccggacgcagccatgttccggccccgctgagccagcgcaactgtctgaggtggaagcccacacggaccacagctccaggaagccgagcaagaaacgaatcgccggaataccaggccgcggccaagcaataaccttaagtctcaggcgactgccgcgagagctgcgatccggaaggcgcgcgctaacaacactcccccgccattggctccgccctcaacaaacaagaacgcttggcctgtgcctgggtttgaacccggagacacatgcgcaaaacgggccgcgccgtccaataggaagcaagccgttagtgggctcgccccttcatgctccaggccaacggccctccagcctgcagacccacccgcccgccctacctctagccgctctgctcttcccacctcccttcctcagcgccgcgcccgggacaggcgcgagactgggcttttattaggaaggcacgatcctgggaaccgctccttgtgcccaatgtaaaacttctcaacagttctattaaggaataataagtaatacttggaaggatgagaggtagaaattgcagacgactttttttttaatagaatctttttttgaagagatttttctaatgcagattcgtcagccacgcccagcccatctaaccatcatctctgaaaataattgaataattatgtataataatggtgatgatggcttgtattctttttcaagtatgtgggcgatatttttatgatgcattgccaacaaatgacccacgtaaatatctatcatttaagtatgatgcactgaaaagaattctatacagaatcctgaaacctgccagccattgactagctatgttatggagggcaaaattgcggcaccattctgggtgtttccatagtgatagaatggaagtctaaattagacgctctgaagacttctcacctgaccagtgtatgattctatgaagctgtatcttattttattatttaatttaaaattacaagaaaattctaatcagaaaatagtttactaattgaataaatacattaatcaggagttgagctaatagatttttaaaacatgtagtgctttaacaaatgctgtcamctatgaaggccaatttttttattttatttatttttttgatagaaaaaaaggaactatgatctctgactgaaattaggcctggattgcactccattccattaattctgccattatgggcaactaagttatctgttccttaattctcttgtctgcaaaatgagaatactattaaagtggttgagatgttgtaattgaataattcctgttaagatctaagcacaatgtttggaacatagtaagaattcaataataaagctattggaatcattatggagagttttttactatgtttggcagttttgccaatcagtccaacttataatttggtgctgtcacatttggaatagataatgataaacactaacatttattgactgcatactctatgcccagttctgaaatgctttgcatgcattgaagagaacaattaatattcctgttttataaacaagggcactgaaacacagagagctaagtgtcttacccaagatcacatcaccactaaatggtaggatgggttattatcccaagaattctcactccacaactgagctcttaatcactacactctttgcctctgggtaagaaattttagcaagcacgattatagatgtaaagtcccacatgtaaaattatatcctcctgcttccactggaaactaagtcccacacttattttgagaaatttggaatgcaatggcttgtgctgctgcagaaagcaggccacagagggcgttgaggattaactgttctaaagaaaatagagcagtactcttataaaaacagttgtggagactccacagtttccagagaaacgttttacttccatatgtacttgttgtagtacttaatagcccaccatggttttagtatcctaaaataggattgctaattaatggggggagtaatatttatttaaaaacccaagtttgtcgttataaatctccccccaaaatacatcaaagattacttcttatgaactgctaggacaatcttgaagttttctttcacaactacttacctagttaaggggtgtgtgtgcatgtgtgtatttacatatcagtatatggaagtattaacatatacataattagatgtgtatatgggaacataaagtatccagaaatttggcttgaaagagaagtaaaaaaaacttttcgttacttatggttttaggtacataatttaaaatttgtaaatcttgaaactatttcaaagaatattttgttttagatctttgatttccatcaaataactatggtatgggtatttactaccaaagtgtcttccattaagtgttagcacaaaaatattcacaactgaactaacacttaaaaattagtctgtattcattcccaccccacagcttaacatgtgcatctgtcctggtgagtggataaacaaatgtacctcaatgcagtgcaatactcttcagcaataaaagcaaactactgatatacaatatggatgaatcttgaaagcactgtactaagtgaaagaagctggacatcaatgactgtatgaaaagaaatcaaatcgctggttaccaggggttgaggagggtgggggaaaaaagactgtaaaggaataagagggaactttttgcggtgctgaaaatattctatgtcttgattacgatggtagttacatggctatatctatttgtcaaaattcctagttagaactgtgcccctgaaaaaggcgacctttttttttttgagaaaggtcttgcttggttgcccaggctggagtgcagtggcacaatcaaggcccactgcagcctctacctgctgggctaaaatgattctcctgcctcagcctcgtgaatatctgggaccacaggcatgcaccaccacaccctgctaatttttttttttttaattttttgtagagatgggatcttcctatgttgcccaagctggtcctgaactcttgggctcaagtgatcctctggcttctgcctcccgaattgctgggttacaggcatgagccaccacacctggccaaaatagtgacttttacagtaaattatacctcagtaaatctgtgagagcgatgataaaagagagaaagagaaaatgagagagactcaaaggcactgtatgaaaaccaaatgcaatgtgtaaactttgattagagtctagttcaaaacaaagtaactgtaaagagcattaagcaataagtgaaaatgaaaaaattaattttcagatgatattagagaattgtaaagttttcttaggtattataatgtgattatgtctatgtaatttgtccttactcttaggatatgcatatcaaagtatttagaggtaaaatgtcttgtgatatttgtaagtactttgaaattgttaatcataaagagattgagatagttaaatacatacggcaaaatattaacaattattgaatctagttcattggtgtgtttattaacaatactctttcagtttctctgtatgtttgaaatatttcatagaaaaatgatggggaaacttgaacttaataaaattgcttaagttctaaaaacttttgcaaaaacatttattatttattctgcaaaagtcaaaagtgaaaatattagcaaatgactatcatataattttgtcagaaaaattacacatgaaaaatgaatttcttctaaaaagtatagcatagtcacaattataacaatatttgctaagataaaatagacttagttttatgattttggtttttttttataatgtaattttttttcttttactccttactgccaaatgttggtccctctgttaaggagattcatttaagtatccttttctgataaaaaattatcctccaatagaaatgctatctatgctatgtagaccataatggaaaagttaataaaatgtgcttgcaatgtacaggtaggtggcagcaatgtttacaaaatagttttaccacgctatgagttgttaaggtctgcaatgtgtcattaattgtaaagtgctatataaattaactgatctttacatttcctaaattacctttgtgtcaaccattgcttattagttatagttatattctattatgtacacattgtttctcttaagatcacaacaaataacactattctgtagatctccattctgcatcctataagataggatagtttacttctagtcaacttattttctactcacacaaaggaaattttgtcattgaaaacacattaagattttcaaaagcttaataaaatggttctgcattgtaattttactcttgagaggacttaaattaccctgagtgaaaattggcaagtaatgtaggatactgtttttaaatttcaggcagtcattgctttgcaaagtagtacaggacccttaaaaagaccctgtaagctgaaaccatgcaaaccgatctttgcttgggaaaaattctgattgtttcatgacctttaaaaaaaaattatcagctggaggcggtggctaacgcctgtaatcctagcactttgggagactgaggctggcggatcacctgaggtcaggagttcaagatcagcctggccaacgtggcaaaaccccgtctctactaaaaatacaaaaattagctgggcgcagtggctcacgcctgtaatcccagcactttgggaggccgaggcaggcggatcacgaggtcaggagatcgagaccgtcctagctaacatggtgaaaccctgtctctactaaaaaatacaaaacaattagccgagcatggtggcgggtgcctgtagtcccagctactcggggggctgaggcaggagaatggcatgaacccgggaggcggagcttgcagtgagccgagatcgtgcaactgcactccagcctgggcaacagagcgagactccgtctcaaaaacaataaaaataaagatacaaaaattagccaggagtggtggtgtacgcctgtaatcccagctactcgggaggctgaggcaggagaattgcttgaacctgggagagaggctgcagtgagccgagatcacgccactgtactgcagcctgggagacagagcgagactcagcctcaaaaaaaaaaaaaaaaaaaaattatcaaaatattaacatgtctcttgctgtcagttataaatttatggggaaatgaaaaaatagtaaaactaatacttatatagcacattgtaactcaaagcattagaaacattgagcattaaagtgctttagttctcagttttgttttctatttttttatttttggctcctgacaggaaacatgctttagttctttgtaaaaaaaaaaaaaaagaaagctatcaagaatagtttgaacagtgcctgcctcctcagctgtaagttatgatacagtgtgagcatcttttggtgaattgttatactacttgctaagcctgggtcattttaaattaagtatatgtggcataggatatataacatatttgtaaattcaagtgtctatggaaactcataaacaataaaataccaaaatggtaacttgcagacagtacctaaaagtaagagttgttttgttttgttttgttttgttttgttttgttttgtttttttccggaggctccatcattcacctaaaagtaagagacaacaggaagataaactagaagcaaagacacagggcagaagtgatgtgctgttgacctagagaaaatctgactaatattgaaaagtgcggccaggcacggtggctcatgtctataatcccagcattttgagaggccaaggcagcaggatcacttgaggccaggagttcacaaccagcctgggcaacatagtgagacccagtctcaacaaaaaatcaaaaatttaaaaatttagccaggtgtgattgcatgtgactagtttcagcttctcaggaggctgaggtgggaggattgcttgccccatggccctctgcctaggcaatagagcaagactccttctcttaaactaaaaataaaaattttaaaagtgttcatgttgacagaatggaactagattatggggcaacttcaatgtcaggataacttttcacttatcctatggacaatggggaactgtggtataatcagggttcaattacataaaagaaaatttgtagccaggcgcggtggctcacgcctgtaatcccagcactttgggaggctgaggcgggcggatcacctgaggtccggagtttgagacccgcctgaccaacgtggcgaaacgccatctctactaaaaatacaaaaacaattagccgggtgtggtggcacatgcctgtaatcccagctactcgggaggctgaggcaggagaattgcttgaacccaggagacggaggctgcagtaagccgagatcacaccactgcactccagacgaggcgacagagcgagattccgtctcaaaaaaaaaaaaaagaacaatttgtgatggctagttttggcaaaaagggatctgctacctgcatttaacagctcataaaatttttgagaggatgaagaaacagtgtattttggattttcaggaataattcccaaatgcacattgaagaactaagccattaagaggcagctgatgtttctacagttataaaacaaatagaaaaattgggaagctgacattaatgcttatgtctccaagatcatactgacatcatgcaatcaggaagccaccacaattacaaagctgccacgttatggaaatcactataagaattaaagaaagaggaaagaaacacaaaaagtggcttgacagccaaagacaggtttattttagagaaaacccaagggggcttctggccaagttaggtcagaggcacactctcttacagactaagagtttttaaggattcagggtgggagagtttatcagaggcttgtactgcttctgtgtctctttgctgtgcttatctgggaggaagacttgtgtgtctgttcccatacatctttctgcgctgcaggcatactcccccgagtctgcttttagcttccctatcttagtgcacctgaagggaaaggaacgtgcttattaaggcccactgttttactggggcccattgtatgagggtgaagtttggcagttacccaagagactttccccccacctccctctgtgcccaagctgtcttatctgttttactctctgctctttctggctgcttgtagttagaagagaagtgatttccttgaaatgcatgaggctaaaaagggagctggaacttaaagtggcagtatttgagatgatggtgctcctgctctgtcagtcactaccaataagaattctccaatgagtctgggtatggtggctcatgtttaattccagcactgtgggaggctaggataggcaaatttcttgaggccgggagttggagaccagcctggccaatatggtgaaaccccatctctactaaaaatacaaaaattagcaaggccatcattgttacagaagtgatattagtagctctgtcagaacagtttaatttgctaacccttataactgtcagtacaaagagttgcatctgggatgataagagcttttcctattacgtattttcaaactatttttgtagtggaaaatgtcacttttgttactgaggagtagtttttggatgccaggtagatacgggaaactggttttcatactaggtaactcacagaataatggtagcttattctatacttatacagtagtggtggcacactactgtaatcccagctactcaggtggctgaggcatgagactcgcttgaactcgggaggcggaggttacagtgagccaagatggtgccactgcactccagcctggaggacacagctagactctgtctcaaaaaaaaaaaaaaaaaaaaaaaaaaaaaaagaatcctctcagagcagaaagcctccttactgcttccggctccagagccacaccttacctaaaatgatatgatgatatgcacaagcaaactgatgtctgtgacttgactatcaacacccatgaagctagtgatcagacattgggacttctgataactttgccacagaaaaattagatgcctacaggccatacatgcctttttattggttagaaaagccaaaggttgcctggtgcagtggctcacatctgttaattccagctactcagaaggctgaggcaggacgattgcttaagcccaggagtttgagaccagcctgggcaacatagccagacctcctctcaatgaagtttaaaaaacaaacaaacaaacaaacaaaaacaaaggcagcataagaatgaaccccgcctcccttctgccttgccaatcatgttgaatgcttttcaatcttagctgcaaagaagtctgaaaaatgtagattttatctttttagcctctgcaataaacaaaagcacactagaagggtttggaatgacggtaagcaccaatccaccttattccctaaggaaggcatgaaggatgagaaataaaagagaaaacatagacttaacctttgtatacattgagtttgaaatggttaaaactgaattcattatccctctaccacccaaactatctccccactctgaatttctagtttctattaaagctaccattattctgtgagttacctagtgtgaaaaccagtgtcctgtatctacctggcatccaaaaactatttctcagtaacaaaagtgatattttccactgtaaaaatagtttgaaaatacataactaggaaaagtttttatcatcccagatgcaactctttgtactgaaaattataagggttagcaaattaaactgttctgacagagctactaatatcacttctgtaacaatgattgcccaccttttttttctgtttcaaaagacttaagggaaacattttctgagtaaaaatggctcactgtatcagtaattctcaggcaaaggagtaggaagctccctccatattgtatgtctgataatctctggagttgtggtattacaatgtgcattttctccactgaaaatgctgcatgtctgggtgtggtggctaatgcctgtaaatcccagcgctttgggaggccaaggcggacggatcatttaaggtaaggagttcaagaccagcctgaccaacatggtgaaatctcatatctactaaaaatacaaaaaattagmcaggtgtggtggtgagcacctgtagtcccagctactcaggaggctgaggcgggagaatggcatgarcctgggaggcagaggtggaaatgagctgagatcatgccactgcactccagtctgggcgacatagcaagactcagtctcagaaaaagaaaagaaaagaaaagaaaaagaaaatgtggcttaactctatcaatagtaataaaaaatttactcataataaagattgtattggattcataccagccattgataagctataagtatttcacacaatggttaaaattaaagttgtattcttcaggtatgagttgcaaaaataaatgtattcaattaaaatatcttagaaatatactaccgcaaattataatgcatatggcaataaatcatcagtaagtattaagcaaaacaaaggtcagaaatgtggaagtactggagcagggttggttgatttgattgattcagtactaataaatggatagaaaagtattttagagatcctcaattattgtaaaaaatgtggatttttactcagatgaccttataacatagaggagtcaatacagcactgagattttggtttatatgagttaaatcttatacttcacccaaagttgttaagttatatttgccataaaacctgatttgtaacaatcttctgtgacacagatgctactgatggctgtaatgttgggctccaatagtttaatagtaacatgattgttctacaaggcaacacaagaatcatatgtcaaccaatggtcacatatatcagaaaaaaggaaactcctgtcacaatggaagctaataattctccaaactagaatcatattttttagctagaagctattcagtaaatatatgatattgcaatctacttataaccaacccctacttcaacacaatctttcctttggaaaaactgtttcttgttgatactcaatgtatacaaataactacaacaggacaaatactataagaaagaaatcgtgcaaagtgctttgggaaagcagaaatgagagtaataacttttttttttgtgggggtgaagaaagcttcaggaaattaggagatgttcagaattaaggatagattcagcctgggtcttgaaggacgagtaggacattaccatataaacaaagagaaggaggggcatctaagcagagtacagtgactgaaaaggtatgaggagacagggaagatcatagggtattcaggcaactgagactaaatgaaattaccagagcaaagggtattttgaggagttattatttaaaaggggccctgctataaaggaccaacgtgccatgcttgagcccattgttggtattcaataagtatttagtgttcaataaaaaatatttaaaaaggaatctcaaaagcaatgagaatcctttaaagtcttttcagtaggggaatatcttgattaggttgaatattaaatgaatcaaagaagaaaaagagtggaaactaggagactacttaaaagccttttgcagctcttcaaacaataagtcatgtagtccatcgcctccttgtataggtgaggaagctatgataccagagaagtcaagtggtttgttcaaggtctcaagagctggttagtagcaaaattagtttatgccctatgtccaaacatattttctactatatttccttacctacaaatttattcttcactgcctaagacttgaggtatctgtaagaggatttccattgtaatggtgcagtggtgcaatgacactagtcattgcagacaggactaacttgttaatattgtttaagcaagatttttgcattttgtagtctttttcagggagatataatttgattcttggtatattaagaatgaatttgacgaacaaatcagcagaccaaagtaacttactgtgtctgattagctgtttttaaattgttgcttatattttaaaggcaaaaaaaaaactaagtgcttatttaacaacaacaaaaaatcccctttacatttttttagaggtattattttctctcacctatgaaactttctgaccataaagtcagtgcgtaatcactgatgattcccagcattctttctttatccttgcttcttttcatttttcaattcttaatccctcctttcacttcccccctgtattacaacaactaacagctgccaagaaagtggattaggtcatatattcaatcaggaggttttcctgttattcaagtcactttcttagtataccgaaactaaaaaatagttatggtttttgcctcaaaaaattcagttggacttatattttattatttgaaggttgggtagcaagaagcaggtctaaacttacaaaagcaaagcagtcattttggatcttcaactccctatttctgtcttgagctgttttcattttgataatacatctgaacactcttctctaacttactgataatcagtccgtattgttctacctcactttgtagacaatttgtcatcccatatctacagctgcaggatcagtgggacccatactggtggagaaaaccatgcagtctctccattaggaaaggagaatcagactgaagactcctgacttgctttgatttctaataataggctggtctcactgggcccaggctgttctaaatctagagtagttctgaaatactgagtgtgaaataggcaatggtagaaattcttaggacccctgtaagacaaatcaaaattccttctagtattcttttctcccatcatttcctgcactgygctacgccaaatccaatctcttaaggaccatttcctacatgcaaccattgagtgcactttggccccagtatagctttataaatctcactagataactgtgggaagtccatccatgaatcatagtatcaatggtctgcagctcagaaagcacaaaagaacaaaataaaagtttgaaaacttacagctttctctgccagatatttttttgccaaatatcttagactcctttgtgttgctgtaacagaatgccacagactggtaatttataatgaacagaaatgtatttcgctcatggttctggagtctggaagtcaaagaacatggccagcatctgatgaggaccttcatgcagcatcattccatggcagaagatagaagagcaagagaggatgatagcatgtgagaaagtgccaaacttgattttataaaaaacccacttccaggccaggtgcaatggctcacacatgtaatcccagcactttgggaggccacagcaggagaatcgcttgagcccaagagtttgagaccaacctgggcaacatagggagatactgtctatacaaaaaatgaaaaagttagctaggagtggtggcgcgtgccttgtagtcccagctacttaggaggctgatgtgtgaggattgtttgagcctgagaggtcaaggctgcagtgagctgtgattgcaccagtgtattccagcctgggcaacagagcaagaccctgcctctgaaaaaagagaaagaaacccactcccacagcattaattaattcattcattcatgagggcagaggcctcatgacttaatcaccttctaaaagtcccatttctaaacactgttgcattggggattaagtttctaacacataagttttggaggacacattcaaaacatagcactaaatattcattgggaactcatgtacttggaatatctactggcaaaaaaaaaaaaaaaagaaagaaagaaaaaagaaaaaaattccatattccgtgttcccataattgtggtttatatttagtgaagcatcaaatgagcatgagatacaactattttttttatttacacaaaacttgaccctaaaatatttaaccaacagaagtagtactaataaaattattctatgaagtaatttttaatgaagctgagtttattcaagtcaygtcttctgcaaataaaaatggacaccaataaacaaaaacaaagatagaaagaataactgtgttcttgatatctcccctaaagttcacaatctctacacctgtttctttcatcttctggtgatgttaatcttctgtttattttgcgctttaaatctaagcacatgtggattacccagagattgccctctgaaagtcagtctacacctgttctttcttacctcacaaaaagtaatggaaaaaaaagtgtgtgtgtgtgtgtgtgcgtctgtgtgtgtgtgtgtcctgttggtggtagtgttggtggttaaaaagcaatttgggacttcctctttgaacagttgccttttcctctcacagaaggaagatttcattttgtttgagacgagaaaccaaaccacacaccaaagagaggggtatgatggctaagaagcccccaaaaccagcccctcgcaggatcttccaggaaaggttaaagattactgctctacctttgtactttgaaggttttttattaatcaagcggtcaggataccgggtgagtctatagatgataatgttaaacctaagacttctgttttaatttaatatttatttcatggtgatgtgatgtgttaagacctccttgtttctgttgaaattaaatcatcttctcttctttgagctcagaaaaatgattccaatttttcataatttaaatacaatgtctggcttaaacctgtatgtatacacatatataatatgtataataacagaggttgtaatattaaggcactaatataaaaaagtcaataagctaaatttccaaagaatttatttaaatatcacaaaagattttggcttgggagataaaatgtttcttgtattttctccacaatttattgctatgcttcaatgatgacatgtaccattaagataaaatgatatcatgattaaaattaaacctgctcctgttctgagtcatttgaagtttataatgatcaaattattaaaaatggcttttgtaaaaattgttaaaatgacaaagttcatactgtttaacattatatatagttatgtgttctaaaatactattcaagatagtgacttttaatttttggggtactactgtgggtattaagtacactaagctacataaatacctttgctctaagaaaatccatgaagcattctgtatttttaaatgtaataattaaaacttatagttagttaaaatcattacttttaaaacagtaattatggatgacttgaaattaattagagaaataagcccaaaattgcctgttattaaataaaaaaatcattaagttaggtcaaattttatgaaattgtatactgactaaaactagaaaaattttaaggttttcagaaattccatcagaaatgtttaatgatgctaaaatatattttctgaggatttatgaatacttgtggaaaaattatatatatgaaaaatctataatagcatattcacatttcttacatatataatcagatcatttactatttgagagtaaagacatggtaatttgtattctgttatggatgttaaacatgcataaataattacctttcagttatattagaattttttagattgatcctatatgcttttaatgtaaattcaatcttgtcaccacaggtaagccacatagtcacactttgccaggaaagggaagttgagaaaaaaaaattctaattagtaatttaaatcaggttgttcattgaatgttttccaaggtatttataataactgtttatgatagcagttttttttaaatgcttaaagaagacatgtcattggtatggttagcagaaagaataagaattttagagtgtcctttatctgatggttttgccacttatagcttgtgatcttgtgcaagttactcaatctccttgagactgtttcaactataagatagagagtatactacttgctacttgcctcctaaggtacattctaggattcagtaggtgttcaatcaatttattcactcaacatttattgtgtgcctcctatgcaccaagcatcactcatttctggagaatatggaaaaaaacacaaagattttattttcaagaggcttaatatagtaggaatgatgtcttccttaccaaatttctactctttaccttctcttagaaagcattctttgaagcagaatgaatacctataggcataaatatttccaatgaaattaacttgtgtttctatttgaatttatagtaaagtatctttgtgtgtgtgggtgtgtgtctgtgtgtgtgtgtgtgtgtgtgacagtgtctcctctgttgcccaagctggagtgcaatggtgcaatcactagtcatgcagccttgacatccccggctccggtgattctcctgcctcagcctcctgagtagctgggactacaagcgcataccacacccggctaacgtttgtattgtttatagagacagggtttcatcacgttgttcaggttggtctcaaactcctgggctcaagcaacctgcccaccttggcctcccaatgtgctagaattacaggcatgggcctctgagttagaccactaagtaccttttacttgtatgtcagggagaagagagcaagaggatgacaataatacctacttatgtggtggtttcagggattaaagggatagcatatgtaaaacacctggctcacactaaaggttagattcattctcttaccctttcatcacttatcatactcttattcaggtactaaaattagtttgaggtctgcaagtaatatgactccaaggagagtgagcatggtgataattagagtacttgaaaatagaagctatgagaaaaatctaagcaaaataagtggaatttccaagcaattggcagcaaagtgccagggaatctttgaacagaaggtgagccaaaggtatatagccaagtaatctttggagctgattggctagaggaaggtgagaggctctgcagaatgtaaagttgggtctctgccaaagtcattcagaacatttaaactagaaaaaatataactgaagagtaacctggtctataaaggcatgaaatgctgagaggtgcttcttagctattttttgtggggcacttttaagtatttaaagagcttttccccaggaaaatgtaacaacgtataccattttgcatgcaattctagaaggtttctaaatctgaggtcaagaacccatgaaaaacacataatctttatggaaaagataatgtgggaagatttatttaagccacagcactaggattctgaattaaccaggaagatgtgtttattatcaaagctgttaaatgccacagtggaataccattggcatcgcagttcttacaaatgggaaaatttctcattttttctgggaccgtttgaaaataagagagagtgtgggtgggccgggagcggtggctcatgcmtgtaatcccagcactctgggaggcccaggtgggcggatcacgaggtcaggaaatggagaccaacctgttcaacatggcgaaaccccgtctctactaaaaatacaaaaattagcagggcatggtggcacgcacctgtggtcccagctactcgggaggctgaggcaggagaatcacttgaacctgggagtcagaggttgcagtgatccgagatcgcgccactgcactccagcctggcaatagagcgagactctgtcaaaaaaaaaaaaaaaaaaaaaaagaaagaaagagagaaagaaagaaaagaaaaagaaagaaaataagagatagtttgggcaacgtctcataatttcttcaatctgtgatgtgctaaagtaaaaaaaaaaaacagtgtgtgtgggccgggcccggtcccagctattcggaaggctgaggcaggagaatcgcttgaatctgggaggcggaggttgcagtgagtcaagatcgtgccactgcactccagcctgggtgacagagcgaaactccgtctcaaaaaaaaaggaaattttttagggctgtctaagttgtgctcacacacagttctctatggcagtaatctccaaattttaaaataacacactcctttcaggaaaacattttgagcacagatccctaatataagaatattaattcagccgggcgtggtggctcacgcctgtaatcccagcactttgggaggccgaggcgggcggatcacgaggtcagaagattgagaccatcctggctaacaaggtgaaaccctgtctctactaaaaaaaaaaaaaaaaaaaaattagccgggcgaggtggtgggcgcctgtagtcccaactactcaggaggctgaagcaggagaatggcgtgaacccaggaggcggagcttgcagggagcggagattgcgccattgcactccaacctgggcaacagagggagactccatctcaaaaacaacaaaaaaagaatattaattcatttggaaattataaatatatatattcccgtactattaatccatgtaaattatttgatatataaaaaatgaattaagaaatatgaaataaaatataattaaatattctaaaattttctctcccaatggatcatcttgcacacctttggaatttatgcatcccattttggagaccactatacaacattcttccttaggtaaatgtactttacttgcgcacaaaaacaaagaatgagagctttttattggggacagaggaagagaaacttaactggagcttgcattgtaattcatttttgctagttaattcatttttgctagttgtattaatgagaaaagagcactgggaagtcaagagataaaagtatcagtccaattctagaatttgggcgattccttcacatttttaaatctgttctctcctttctaaaaagaataattactctcttgcatagctgaataggttgctccaatgactaagtggactatataataatgaatgcaaccttttgaggtataacatataatggatmccattctaggctcttagtgttctgtcactgtgatccttacagtaactcttctgggtagaaattattttattcacttcacaaatgagtgagtaggtgaggcatgctggctcatccctgtaatcccagcacttatggaggccaaggcaggaggattgcttgaggccaggagttggagatcagcctaggcaatatagcgaaaccccatttctacaaaatcaaaaaattagccaggcgtggtggcacaccctgtattctcaggtactcgggaggctgaagtgggaggatcacttgaacccaggagttcgaggctgcagtgagctatgattgcatcactgcaccccagcctgagcaacagagcgagaccctgtctctctaaaacaacaactccaaataaacaaatgagtgagttctggccacagaggttattcaaggttcctcttccattaaggaggctagcttggatttgattgtgatgcacttgaccatgctgcttctcaaactcaaattctaccatttgattgtaggtttcctagttaagctagtgataaattcagaagtcttatttcagcctcttttcttacatcaatgatttcacacaaacgattgttaaaaaaaaaaaaaaagaaatttgtgcttcattccaaagatatgtccttccaaattaatttttttaatttttaagtatttctctagatatgaataggtacctagatgttgtttattgagattgatatttataaatgactcagattctatgtgtatttattacatcttatcgaaatgaaatcaagattgtgayctgtaagtctctgcatactgaatataagtttggtctgtccttaggtttgcagctgtggttgcagttcacatggtctaatgctatttgtaaccttacttttcctccagggctgcctttgctttcaacttagtgcctttatacttgcttttccccccatttaataaatccttaatcctttccacaagtatatacgtttgcttacctgtaaaactcccatttttccctatttaactttacccaattcatatcattcttttgagactgaacacctctayaatttttctcgatagtgcaatggaggtctgcatgtacatacagagggaattcaataaacctttactggctatcagtaatactagtttttataccttatggcagggtaatactgtag

SEQ ID NO: 5 - DNA, 3046 bp, Homo sapiens
gttggaaacggcactgctgagtgaggttgaggggtgtctcggtatgtgcgccttggatctggtgtaggcgaggtcacgcctctcttcagacagcccgagccttcccggcctggcgcgtttagttcggaactgcgggacgccggtgggctagggcaaggtgtgtgccctcttcctgattctggagaaaaatgccggtccggaagcaagatacccagagagcattgcaccttttggaggaatatcgttcaaaactaagccaaactgaagacagacagctcagaagttccatagaacgggttattaacatatttcagagcaacctctttcaggctttaatagatattcaagaattttatgaagtgaccttactggataatccaaaatgtatagatcgttcaaagccgtctgaaccaattcaacctgtgaatacttgggagatttccagccttccaagctctactgtgacttcagagacactgccaagcagccttagccctagtgtagagaaatacaggtatcaggatgaagatacacctcctcaagagcatatttccccacaaatcacaaatgaagtgataggtccagaattggttcatgtctcagagaagaacttatcagagattgagaatgtccatggatttgtttctcattctcatatttcaccaataaagccaacagaagctgttcttccctctcctcccactgtccctgtgatccctgtcctgccagtccctgctgagaatactgtcatcctacccaccataccacaggcaaatcctcccccagtactggtcaacacagatagcttggaaacaccaacttacgttaatggcacagatgcagattatgaatatgaagaaatcacacttgaaaggggaaattcagggcttggtttcagcattgcaggaggtacggacaacccacacattggagatgactcaagtattttcattaccaaaattatcacagggggagcagccgcccaagatggaagattgcgggtcaatgactgtatattacragtaaatgaagtagatgttcgtgatgtaacacatagcaaagcagttgaagcgttgaaagaagcagggtctattgtacgcttgtatgtaaaaagaaggaaaccagtgtcagaaaaaataatggaaataaagctcattaaaggtcctaaaggtcttgggtttagcattgctggaggtgttggaaatcagcatattcctggggataatagcatctatgtaaccaaaataattgaaggaggtgcagcacataaggatggcaaacttcagattggagataaacttttagcagtgaataacgtatgtttagaagaagttactcatgaagaagcagtaactgccttaaagaacacatctgattttgtttatttgaaagtggcaaaacccacaagtatgtatatgaatgatggctatgcaccacctgatatcaccaactcttcttctcagcctgttgataaccatgttagcccatcttccttcttgggccagacaccagcatctccagccagatactccccagtttctaaagcagtacttggagatgatgaaattacaagggaacctagaaaagttgttcttcatcgtggctcaacgggccttggtttcaacattgtaggaggagaagatggagaaggaatatttatttcctttatcttagccggaggacctgctgatctaagtggagagctcagaaaaggagatcgtattatatcggtaaacagtgttgacctcagagctgctagtcatgagcaggcagcagctgcattgaaaaatgctggccaggctgtcacaattgttgcacaatatcgacctgaagaatacagtcgttttgaagctaaaatacatgatttacgggagcagatgatgaatagtagtattagttcagggtcaggttctcttcgaactagccagaagcgatccctctatgtcagagccctttttgattatgacaagactaaagacagtgggcttcccagtcagggactgaacttcaaatttggagatatcctccatgttattaatgcttctgatgatgaatggtggcaagccaggcaggttacaccagatggtgagagcgatgaggtcggagtgattcccagtaaacgcagagttgagaagaaagaacgagcccgattaaaaacagtgaaattcaattctaaaacgagagataaagggcagtcattcaatgacaagcgtaaaaagaacctcttttcccgaaaattccccttctacaagaacaaggaccagagtgagcaggaaacaagtgatgctgaccagcatgtaacttctaatgccagcgatagtgaaagtagttaccgtggtcaagaagaatacgtcttatcttatgaaccagtgaatcaacaagaagttaattatactcgaccagtgatcatattgggacctatgaaagacaggataaatgatgacttgatctcagaatttcctgacaaatttggatcctgtgttcctcatacaactagaccaaaacgagattatgaggtagatggaagagattatcattttgtgacttcaagagagcagatggaaaaagatatccaggaacataaattcattgaagctggccagtataacaatcatctatatggaacaagtgttcagtctgtacgagaagtagcaggaaagggcaaacactgtatccttgatgtgtctggaaatgccataaagagattacagattgcacagctttaccctatctccatttttattaaacccaaatccatggaaaatatcatggaaatgaataagcgtctaacagaagaacaagccagaaaaacatttgagagagccatgaaactggaacaggagtttactgaacatttcacagctattgtacagggggatacgctggaagacatttacaaccaagtgaaacagatcatagaagaacaatctggttcttacatctgggttccggcaaaagaaaagctatgaaaactcatgtttctctgtttctcttttccacaattccattttctttggcatctctttgccctttcctctggaaaaaa

SEQ ID NO: 6 - DNA, 4231 bp, Homo sapiens
ctgaggcagccgccctcgcgctgtgcaatttctggtctttcgttgcttctggtccaggctaataaagtttttctttctttaattttttttcttctagttttaacgggagaaattaactccccggggccgccgggttgactgcgctgcctgggccggaggtcttctccggccagggagcgctgtgggaaggggctcgagcggccagggccaggcgaggccgggggggcggggggttaggggaccgcggggctactcttgggagcgcccctgtccggctggctgcgcgccggttttaaatagcatctttcggacttgtcttcgcggccccagtccccgacctcggcgctgcctgggctcctgcagcctctccctaagtcttctccaaacgaccacctcacggattccttatggatcgcagctccaagaggaggcaggtgaagcctttggcagcttctctgctggaagctcttgattatgatagttcagatgacagtgattttaaagttggagatgcctcagattctgaagggagtggtaatggaagtgaagatgcttcaaaggacagtggagaaggttcctgtagtgattctgaagaaaatattttagaagaagaactgaatgaagatattaaagtaaaagaagaacaacttaaaaattctgcagaggaagaagtactatcatcagaaaaacaattaattaaaatggaaaagaaggaagaagaagaaaatggagaaagacctagaaagaaaagggagaaagagaaggaaaaagaaaaggaaaaggagaaagagaaggaaagagagaaggaaaaagaaaaagcaacagtatctgagaatgtggctgcttctgctgctgccaccacaccagccacaagtcctcctgctgttaacacatccccttctgttcccactacgacaaccgctacagaggaacaagtcagcgagccaaaaaaatggaaccttcgacgaaaccgaccacttctggattttgtgtccatggaagagctgaatgacatggatgactatgacagtgaggatgacaatgattggcgacctactgtagtaaagagaaaagggagatctgcatctcagaaagagggaagtgatggagacaatgaggatgatgaagatgagggaagcgggagtgatgaagacgagaatgatgaaggcaatgatgaagatcatagtagccctgccagtgaagggggttgcaagaagaagaagagtaaagttcttagcagaaacagtgctgatgatgaggaactgaccaatgatagcctgaccctatctcaaagcaagagtaatgaggactcgctgattcttgagaagagtcaaaactggagctctcaaaaaatggaccatattctgatttgctgtgtttgtctgggagataatagtgaggacgctgatgaaataattcagtgtgacaattgtggcattacagtccatgaaggttgttatggagttgatggagagagtgactctattatgagttcagcttctgaaaactccactgaaccttggttttgtgatgcctgtaaatgtggtgtttctcctagctgtgaactgtgtcctaatcaggatggaattttcaaggagacagatgctggaagatgggttcatattgtttgtgccctgtatgttcctggagtagcctttggagatattgacaaattacgaccagtaacactaacggaaatgaactattccaaatatggtgccaaggagtgtagcttttgtgaagaccctcgctttgctagaactggggtttgcattagctgtgatgcagggatgtgcagagcctatttccatgtgacctgtgctcaaaaggaaggtctgctttcagaggcagcggcggaagaggatatagcagatccattctttgcttattgtaagcaacatgcagataggttagacagaaagtggaagagaaaaaactacttggctctacagtcctattgtaaaatgtctttgcaagagagagagaagcaactatcaccagaagcacaggcaaggatcaatgcccggcttcagcagtatcgtgccaaagcagaactagctcgatctaccagaccccaggcctgggttccaagggaaaaattgcccagaccactcaccagcagtgcttcagctattcgtaaacttatgcggaaagcagaactcatggggatcagtacagatatctttccagtggacaattcagatactagttctagtgtggatggaaggagaaaacataagcaaccagctctcactgcagattttgtgaattattattttgagagaaatatgcgcatgattcaaattcaggaaaatatggctgaacaaaagaatataaaagataaattagagaatgaacaagaaaagcttcatgtagaatataataagctatgtgaatctttagaagaactacaaaacctgaatggaaaacttcgaagtgaaggacaaggaatatgggctttactaggcagaatcacagggcagaagttgaatataccggcaattttgcgagcacccaaggagagaaaaccaagtaaaaaagaaggaggcacacaaaagacatctactcttcctgcagtactttatagttgtgggatttgtaagaagaaccatgatcagcatcttcttttattgtgtgatacctgtaaactacattaccatcttggatgtctggatcctcctcttacaaggatgccaagaaagaccaaaaacagttattggcagtgctcggaatgtgaccaggcagggagcagtgacatggaagcagatatggccatggaaaccctaccagatggaaccaaacgatcaaggaggcagattaaggaaccagtgaaatttgttccacaggatgtgccaccagaacccaagaagattccgataagaaacacgagaaccagaggacgaaaacgaagcttcgttcctgaggaagaaaaacatgaggaaagagttcctagagagagaagacaaagacagtctgtgttgcaaaagaagcccaaggctgaagatttaagaactgaatgtgcaacttgcaagggaactggagacaatgaaaatcttgtcagatacccttcatgagacccaactctgccacagctcatcctcggaggcaatcccggaaacctcttttataagtgtgattttaaaaatgtggattaaactctcgatagagtacataaagtaaaggagaacagctatattgtcctttctataagcttgtcactgcaaaaagttgccttttgcttgtcaggtttggatagaatataattgattggtttgttacttggactaacaaggcagtagatttgcctgtgtggaattttttttcctatttttcttctttttgctttttttgcacttatcagaaatatttgatgtgtgcattgttgaaaaatactggatacatgtcttgtcagaattgtcgtattaagtaatgtctttccctcttgcttctttggcaaatgttgatacacagtgtttggacttactgaagagttactgaagcctgtgggacttaataaatacaatatgctactccctgttgtgattgaacaatacaaataacaaacaagaaagacaatgcattccattagtctgctattctgtttccttcaacttcatacatagattcatatatgaagtactgcattgtaaaacaactatagactcatattaaatgttatttctatttataatattcagcaaaagtgaaagacttgtgaagcatatgacattctatttttgacttattagtcctagtgtgaaagcattaatattattagcatgaaatttttacttcagattttaagctcatgaataaagatatatctgtgttgatctctagatatttttagtaatacccaaatatattcagtccttattgttttaatataagctttctgtgttcagtataattttatttttctcaaccttaaatatgaacttaggaaataaggagggaagtacaaagattattgactatacaacctaccagctgaaagaaagatcttcatcaacatctgtatctttccagaggtatacagaattaaaatttgatcttcaagctttaatgatccagttttaagtcaacggcagaagtatgttgaatatttcatcactcaatcttgaactgatttagaagagactctttgctgaaattgaattgcacttatacatgtaaattgtcaacatgtaatttggaattttctgattaataaatgtggttttggacatct

SEQ ID NO: 7 - DNA, 4122 bp, Homo sapiens
acattgtagcaaaatggcgactgtcattcacaaccccctgaaagcgctcggggaccagttctacaaggaagccattgagcactgccggagttacaactcacggctgagtgcagagcgcagcgtgcgtcttcccttcctggactcacagactggggtggcccagaacaactgctacatctggatggagaagaggcaccgaggcccaggccttgccccgggccagctgtatacataccctgcccgctgctggcgcaagaagagacgattgcacccacctgaagatccaaaactgcggctgctggagataaaacctgaagtggagcttcccctgaagaaggatgggttcacctcagagagcaccacgctggaagccttgctccgtggcgagggggttgagaagaaggtggatgccagggaggaggaaagcatccaggaaatacagagggttttggaaaatgatgaaaatgtagaagaagggaatgaagaagaggatttggaagaggatattcccaagcgaaaggacaggactagaggacgggctcgctgccctctcccttccctgcactgtttttcctcccttccctctgccgtgatagatgctaaggagtggggtggaggtgggaagtgggaagcaacagtggcgtataggaaaaagaaaatataccccgtgcacattttcaacatgtagttgaagaagcctaaattaggtactagaaaaaaaaaaaggacagaaacactgcctgatatgtgagcaagagcatgaaaatatagaatgattatctcagagcagaggaggtggggagcaggtggctggagagaggcggggtaggtaggcagggcgtccctggctcaccaatgcgtctggtccacatggcatttgggaaagcagatgggtcatgcttttgcaatgaatggtcagatgcttagggggcatttgtgctcctctggccaggaaagggaacagagtccatccaagctgccccccactcatctgccatggttgtccaccctgggggtttttcctctgaaggaaaatgaacccatcttttgcctgccatgaatcattgcagggcaggctgttactggctaaattaaaacccttggcagggcatcgactgtgtgcgaggcaatgctctaggtcctgtaggggctggaaaataaaccgcatgctggcctagccttcaagttgcttttcagccatgaaactaagctctgccaagcaatcgtgattgtaggtcaagtatcgcgccatcacggaaggtgtaagtatatgtaggtttctctgttgaggatgcgtgttcctcagtagaagacaagcaggtggaggcatccagtgatttctaccctgtggaggctgaggggtcgggggaagaaaacagatgacctcagcctagttgctttaatctgcttttccaagcactggatgcccttggatgacagcatcctcagcattaaaactggtgaactgatgaagtcacctggcctggagtgtgttgggcagccagtgtccccagagctgcttgtgggtttctggggtggaaggcagggaggtgcaactggcagggcctgatcagaggcagaaaatgacccccacagtggtcttttccctgctagagaaagcagagagcgggactgggggggtgggggcttcaagtacagattgggcacactccaccagaccccagcaaggtcagctgccccacgcctgtatctggcactgctggtgtgtgcagggatgaaacccagcatcagagaggttttcagcaaaccttccatgctcacctttggccaggtgcttgtcagatcctagcttcgtgctggcttagactctcagttgtttgtgttgacagcattaggaataaaccgtttgtttcatctttccttttctccacacgtgtcacagccagatttcagctttgagttattccctgaagaagccacaccaaccttgctttcaagcaaaatgcctgggcttgggggaaggtgtgtatctgtccatgtgtggatgtcggctcagagctatagcttctctgtggggggtggcccaagggaaggctcctctggggccctggatggcacatgactcccagtgaggagaattcaggtgatctctgtggaggtagtcagggacacaaggcttggctgtgagtctggttttaaagtgcgtgacagcctgaaaagcatgcaggggtttggtccactcacctacttgaaagcctgtgggcaacgttcttttgagccaagacttctctgaatggccctgctggtggaaggggtgaggcaaaggcctctgacttggaccctttccacaccagactggcagcacttcccccaggcagccagtggtgggccctgagccctcaggtccccagctccttgagggatgaacctgggagcccaagagccagtggctgagctctgagaaggctccatctcccacctgcccttgagcgcgctctcaggctgagaacacggtctcatcaggcgccttcctggcctgatgctgtgctgtctacgtcacacggtcgattcacaaaagccagaactagacctcaaccaggtcatctccccgttgccaagtgggttcagggtgagggcaatttgtaagctcaatttctctgacagccaagacatggagcatctctgctaagaagccaaaagaaattggttttcttcttctcattgctgaagcccctctgtgtctcttctcagggacaggctggtccagtggctttggtgagggcgcctccatttgtgaacgctgggattcctctgggtgggctttggcaggtggctcctatggtaggaaggatgaccaggtccctgggaatgagctgcctacctgctgctccacgaggaagctcaggcctgcacaggctccaccaggccttggatgccctctagttgagtcagagaccctggaaacacactgagatctccaattgctgcctccattgatgtctctagacctgcagatacgaagcaaacctgggattgcttcttccaggtatgggcaccagagagggaggccactgcaacattttatccccatcattccaaaatgcttgcttgtctcttttacctcacactcacaactccttctgagactctcagtcataaaggaatgaccaagagagtgggtctccagtgagagaaatgcctatgaaagagggtttccctttttgctcttttgaacaccctccccactgatccttgggacccaacgccgcattgcctcttgcagatgaggttttgccttgggctgcttgggtacttcagaccaggactgagtctgacacagctttcatgaggttacagaaaagggctacagatttgggaagctgtgtgtaatggtcttgagacaatatctccatttggcccaccctggcttctctaaaaagcaacgacagcaacagacaaacaaaaagctcccacctcccaccccgttagctgtcctcctccttcactgtgatgtggttgcggtctctgtaggtgtgtgtgccacccttgtcctctgtcctctggggatgtgcccttcccacgtgtgtcaggttcccactctttcgtggttcctaacgtgaagtgctgtgatgtttctgccctgcctaaggaacgtatcaagctctctcagtgtttcagtgttggagattgaggctgtgccacatcttctgccatcctaaggggacatgatggttctgtgattcccagagagctggcagattgtgacaatctccaggagaacctacagattggaagcagcccacacctgatgtggactcctgtcccgggactcactcttcattcagaagactggtggcccacgtgccaggaccaccccacctctcttgctgccttttctcctgtcctgatggggttctgggagggagacctgtcgctgatgagatgaagaatgtggggatcgagcagccttcttctttgggacccctcgatatcccatggaatgctcgcacgttctcaaagactgagtcacaagcccctaccccttccttgctgtggttagtatcttgttctgtgattggttagcaatgttgactacccacgtagtgaatcttttgtctgcaatttagagaatgtgtaaacaaataaaaggctttaaaactc

SEQ ID NO: 8 - DNA, 3132 bp, Homo sapiens
cggatcgcagctctcgcggcagtcgcctgagacttaaggttattgcttggccgcggcctggtattccggcgattcgtttcttgctcggcttcctggagctgtggtccgtgtgggcttccacctcagacagttgcgctggctcagcggggccggaacatggctgcgtccggtctggatcatctcaaaaatggctacagaagaagattttgtcgaccttccagggcacgtgacattaacacagagcaaggccagaatgttctggaaatcttacaagactgttttgaagaaaaaagtcttgccaatgattttagtacaaattctacaaaatcagtgcctaattcaacacgcaaaataaaagacacttgtattcagtcaccaagcaaagagtgccagaaatcacatccaaagtcagttccagtttcttcaaagaagaaagaagcctctctacagtttgttgtagaaccaagtgaagccacaaacagatcagttcaggcccatgaagttcatcagaaaattctggcaactgatgttagttccaaaaatacacctgactcgaaaaaaatatcaagtagaaacataaatgatcatcacagtgaagctgatgaagaattttacttatccgttggctcaccttctgttcttttggatgcaaaaacatctgtatcacaaaatgttattccatctagtgccaaaaagagagagacttacacttttgaaaattcagtaaatatgctgccttcaagtacagaggtttcagttaaaaccaaaaaaaggttaaactttgatgataaagttatgttaaagaaaatagaaatagataataaagtatcagatgaagaggataaaacatcggaaggacaagaaagaaaaccatcaggatcatctcagaatagaatacgagattcagaatatgaaattcaacgacaagctaaaaaaagtttttcaacattgtttttagaaacagtaaaacgaaaaagtgaatccagtcccattgttaggcatgcggcaactgctccacctcattcgtgtcctcccgatgatacgaagttgatagaggatgaatttataattgatgagtcggatcaaagttttgccagtagatcttggattacaataccaagaaaggcagggtctctgaaacaacgcacaatatccccggctgagagcactgcactctttcaaggtagaaagtcaagagaaaagcatcataatatattacctaagactttggcaaatgacaaacattcccataaacctcacccagtagagacatctcagccctctgataaaacagtactggatacaagttatgctttgatagatgaaacagtaaataattatagatctacaaaatatgaaatgtattccaagaatgcagaaaaaccatctagaagcaaaaggactataaaacaaaaacagagaagaaaattcatggctaaaccagctgaagaacagcttgatgtgggacagtctaaagatgaaaacatacatacatcacatattacccaagacgaatttcaaagaaattcagacagaaatatggaagagcatgaagagatgggaaatgattgtgtttccaaaaaacagatgccacctgtgggaagcaagaaaagtagcactagaaaagataaggaagaatctaaaaagaagcgcttttccagtgagtccaagaacaaacttgtacctgaagaagtgacttcaactgtcacgaaaagtcgaagaatttccaggcgtccatctgattggtgggtggtaaaatcagaggagagtcctgtttatagcaattcttcagtaagaaatgaattaccaatgcatcacaatagtagccgaaaatctactaagaaaacaaatcagtcatctaagaatattaggaaaaaaactattccacttaaaaggcagaagacagcaactaaaggcaaccaaagagtacagaagtttttaaatgctgaaggttctggaggtatcgttggtcatgatgaaatttccagatgttcactgagtgagccattggaaagtgatgaggcagacttggctaagaagaaaaatcttgattgttctagatctacaagaagctcaaagaatgaagataacattatgactgcacagaatgttcccctaaagcctcagaccagtggatatacatgtaatataccaacagagtcaaacttggattctggagagcataagacttcagttttagaggaaagtggaccttccaggctcaataataattatttaatgtctggaaagaatgatgtggatgatgaggaagttcatggaagttcagatgactcaaaacaatctaaagtgataccaaagaacagaatccatcacaaactagtattgccctccaacacaccaaatgttcgcaggaccaagagaacacgtttgaaacctttggagtactggcgaggagagcgaatagattatcaaggaaggccatcaggaggattcgtgattagtggagtactatctccagacacaatatcgtctaaaaggaaggcaaaagaaaatattggaaaagtcaacaaaaaatctaataagaaaaggatctgtcttgataacgatgaaagaaagactaacttaatggtaaatctaggtatacctcttggagatcctttgcagccaacgagggtaaaggacccagaaacaagagagattattctcatggatcttgtaaggccacaagatacatatcaattttttgttaagcatggtgagttgaaggtatacaagacattggatacaccctttttttctactgggaaattgatattaggaccacaagaagaaaagggaaagcagcatgttggccaggatatattggttttttatgttaactttggtgaccttttgtgtactttacatgaaacaccttatatattaagtactggggattcgttctatgttccttcaggtaactattataacatcaaaaatctccggaatgaggaaagtgttcttctttttactcagataaaaagatgaaagatcaaccaaccttaaatatatgtatgtatatatgtatatgtaaaaacagtttgtatagttggaatatttgtctttgtaattacttgtgatgttttaaaataaaaattttattcagttttgtgtaaaaaaaaaaaaaaaaaa

SEQ ID NO: 9 - protein, 926 aa, Homo sapiens
MPVRKQDTQRALHLLEEYRSKLSQTEDRQLRSSIERVINIFQSNLFQALIDIQEFYEVTLLDNPKCIDRSKPSEPIQPVNTWEISSLPSSTVTSETLPSSLSPSVEKYRYQDEDTPPQEHISPQITNEVIGPELVHVSEKNLSEIENVHGFVSHSHISPIKPTEAVLPSPPTVPVIPVLPVPAENTVILPTIPQANPPPVLVNTDSLETPTYVNGTDADYEYEEITLERGNSGLGFSIAGGTDNPHIGDDSSIFITKIITGGAAAQDGRLRVNDCILQVNEVDVRDVTHSKAVEALKEAGSIVRLYVKRRKPVSEKIMEIKLIKGPKGLGFSIAGGVGNQHIPGDNSIYVTKIIEGGAAHKDGKLQIGDKLLAVNNVCLEEVTHEEAVTALKNTSDFVYLKVAKPTSMYMNDGYAPPDITNSSSQPVDNHVSPSSFLGQTPASPARYSPVSKAVLGDDEITREPRKVVLHRGSTGLGFNIVGGEDGEGIFISFILAGGPADLSGELRKGDRIISVNSVDLRAASHEQAAAALKNAGQAVTIVAQYRPEEYSRFEAKIHDLREQMMNSSISSGSGSLRTSQKRSLYVRALFDYDKTKDSGLPSQGLNFKFGDILHVINASDDEWWQARQVTPDGESDEVGVIPSKRRVEKKERARLKTVKFNSKTRDKGQSFNDKRKKNLFSRKFPFYKNKDQSEQETSDADQHVTSNASDSESSYRGQEEYVLSYEPVNQQEVNYTRPVIILGPMKDRINDDLISEFPDKFGSCVPHTTRPKRDYEVDGRDYHFVTSREQMEKDIQEHKFIEAGQYNNHLYGTSVQSVREVAGKGKHCILDVSGNAIKRLQIAQLYPISIFIKPKSMENIMEMNKRLTEEQARKTFERAMKLEQEFTEHFTAIVQGDTLEDIYNQVKQIIEEQSGSYIWVPAKEKL

SEQ ID NO: 10 - protein, 888 aa, Homo sapiens
MDRSSKRRQVKPLAASLLEALDYDSSDDSDFKVGDASDSEGSGNGSEDASKDSGEGSCSDSEENILEEELNEDIKVKEEQLKNSAEEEVLSSEKQLIKMEKKEEEENGERPRKKREKEKEKEKEKEKEKEREKEKEKATVSENVAASAAATTPATSPPAVNTSPSVPTTTTATEEQVSEPKKWNLRRNRPLLDFVSMEELNDMDDYDSEDDNDWRPTVVKRKGRSASQKEGSDGDNEDDEDEGSGSDEDENDEGNDEDHSSPASEGGCKKKKSKVLSRNSADDEELTNDSLTLSQSKSNEDSLILEKSQNWSSQKMDHILICCVCLGDNSEDADEIIQCDNCGITVHEGCYGVDGESDSIMSSASENSTEPWFCDACKCGVSPSCELCPNQDGIFKETDAGRWVHIVCALYVPGVAFGDIDKLRPVTLTEMNYSKYGAKECSFCEDPRFARTGVCISCDAGMCRAYFHVTCAQKEGLLSEAAAEEDIADPFFAYCKQHADRLDRKWKRKNYLALQSYCKMSLQEREKQLSPEAQARINARLQQYRAKAELARSTRPQAWVPREKLPRPLTSSASAIRKLMRKAELMGISTDIFPVDNSDTSSSVDGRRKHKQPALTADFVNYYFERNMRMIQIQENMAEQKNIKDKLENEQEKLHVEYNKLCESLEELQNLNGKLRSEGQGIWALLGRITGQKLNIPAILRAPKERKPSKKEGGTQKTSTLPAVLYSCGICKKNHDQHLLLLCDTCKLHYHLGCLDPPLTRMPRKTKNSYWQCSECDQAGSSDMEADMAMETLPDGTKRSRRQIKEPVKFVPQDVPPEPKKIPIRNTRTRGRKRSFVPEEEKHEERVPRERRQRQSVLQKKPKAEDLRTECATCKGTGDNENLVRYPS

SEQ ID NO: 11 - protein, 224 aa, Homo sapiens
MATVIHNPLKALGDQFYKEAIEHCRSYNSRLSAERSVRLPFLDSQTGVAQNNCYIWMEKRHRGPGLAPGQLYTYPARCWRKKRRLHPPEDPKLRLLEIKPEVELPLKKDGFTSESTTLEALLRGEGVEKKVDAREEESIQEIQRVLENDENVEEGNEEEDLEEDIPKRKDRTRGRARCPLPSLHCFSSLPSAVIDAKEWGGGGKWEATVAYRKKKIYPVHIFNM

SEQ ID NO: 12 - protein, 943 aa, Homo sapiens
MAASGLDHLKNGYRRRFCRPSRARDINTEQGQNVLEILQDCFEEKSLANDFSTNSTKSVPNSTRKIKDTCIQSPSKECQKSHPKSVPVSSKKKEASLQFVVEPSEATNRSVQAHEVHQKILATDVSSKNTPDSKKISSRNINDHHSEADEEFYLSVGSPSVLLDAKTSVSQNVIPSSAKKRETYTFENSVNMLPSSTEVSVKTKKRLNFDDKVMLKKIEIDNKVSDEEDKTSEGQERKPSGSSQNRIRDSEYEIQRQAKKSFSTLFLETVKRKSESSPIVRHAATAPPHSCPPDDTKLIEDEFIIDESDQSFASRSWITIPRKAGSLKQRTISPAESTALFQGRKSREKHHNILPKTLANDKHSHKPHPVETSQPSDKTVLDTSYALIDETVNNYRSTKYEMYSKNAEKPSRSKRTIKQKQRRKFMAKPAEEQLDVGQSKDENIHTSHITQDEFQRNSDRNMEEHEEMGNDCVSKKQMPPVGSKKSSTRKDKEESKKKRFSSESKNKLVPEEVTSTVTKSRRISRRPSDWWVVKSEESPVYSNSSVRNELPMHHNSSRKSTKKTNQSSKNIRKKTIPLKRQKTATKGNQRVQKFLNAEGSGGIVGHDEISRCSLSEPLESDEADLAKKKNLDCSRSTRSSKNEDNIMTAQNVPLKPQTSGYTCNIPTESNLDSGEHKTSVLEESGPSRLNNNYLMSGKNDVDDEEVHGSSDDSKQSKVIPKNRIHHKLVLPSNTPNVRRTKRTRLKPLEYWRGERIDYQGRPSGGFVISGVLSPDTISSKRKAKENIGKVNKKSNKKRICLDNDERKTNLMVNLGIPLGDPLQPTRVKDPETREIILMDLVRPQDTYQFFVKHGELKVYKTLDTPFFSTGKLILGPQEEKGKQHVGQDILVFYVNFGDLLCTLHETPYILSTGDSFYVPSGNYYNIKNLRNEESVLLFTQIKR

SEQ ID NO: 13 - DNA, 23 bp, Artificial Sequence
  Illustrative oligonucleotide motif
  misc_feature (3)..(21): n is a, c, g, or t
aannnnnnnnnnnnnnnnnnntt

SEQ ID NO: 14 - DNA, 30 bp, Artificial Sequence
  Synthetic PCR primer
acgttggatggcttcaactgctttgctatg

SEQ ID NO: 15 - DNA, 30 bp, Artificial Sequence
  Synthetic PCR primer
acgttggatgtttctcagggtcaatgactg

SEQ ID NO: 16 - DNA, 20 bp, Artificial Sequence
  Synthetic PCR primer
gcaaacgtgcacatttgcac

SEQ ID NO: 17 - DNA, 20 bp, Artificial Sequence
  Synthetic PCR primer
ttcctgggaatggatttcag

SEQ ID NO: 18 - DNA, 20 bp, Artificial Sequence
  Synthetic PCR primer
ccagggtgtgttctaatacg

SEQ ID NO: 19 - DNA, 20 bp, Artificial Sequence
  Synthetic PCR primer
aagtcactaaccccacacac

SEQ ID NO: 20 - DNA, 20 bp, Artificial Sequence
  Synthetic PCR primer
ttctgagatgatcctgatgg

SEQ ID NO: 21 - DNA, 21 bp, Artificial Sequence
  Synthetic PCR primer
ccctccttttaaccttttagg

SEQ ID NO: 22 - DNA, 23 bp, Artificial Sequence
  Synthetic PCR primer
cagggtcaatgactgtatattac

SEQ ID NO: 23 - DNA, 22 bp, Artificial Sequence
  Synthetic PCR primer
acagagttttaaacctcctaca

SEQ ID NO: 24 - DNA, 20 bp, Artificial Sequence
  Synthetic PCR primer
cgtcagcaaatgtgtaccga

SEQ ID NO: 25 - DNA, 22 bp, Artificial Sequence
  Synthetic PCR primer
atggttttctttcttgtccttc

SEQ ID NO: 26 - DNA, 30 bp, Artificial Sequence
  Synthetic PCR primer
acgttggatgtgtctcgcttttagcctgtg

SEQ ID NO: 27 - DNA, 30 bp, Artificial Sequence
  Synthetic PCR primer
acgttggatgcagacagacatacagaaggg

SEQ ID NO: 28 - DNA, 30 bp, Artificial Sequence
  Synthetic PCR primer
acgttggatggcagaaccatggagaaaagc

SEQ ID NO: 29 - DNA, 30 bp, Artificial Sequence
  Synthetic PCR primer
acgttggatgggcaagagtaaggcactatc

SEQ ID NO: 30 - DNA, 31 bp, Artificial Sequence
  Synthetic PCR primer
acgttggatggccactgaattgtacattaac

SEQ ID NO: 31 - DNA, 30 bp, Artificial Sequence
  Synthetic PCR primer
acgttggatgattggagtcccgagctaaac

SEQ ID NO: 32 - DNA, 30 bp, Artificial Sequence
  Synthetic PCR primer
acgttggatgcctgttttcatttagactcc

SEQ ID NO: 33 - DNA, 30 bp, Artificial Sequence
  Synthetic PCR primer
acgttggatgtgctcacaaagatttaaacc

SEQ ID NO: 34 - DNA, 30 bp, Artificial Sequence
  Synthetic PCR primer
acgttggatgttgaacagctcagctgaaag

SEQ ID NO: 35 - DNA, 30 bp, Artificial Sequence
  Synthetic PCR primer
acgttggatgagatacatgtcttgtctggg

SEQ ID NO: 36 - DNA, 30 bp, Artificial Sequence
  Synthetic PCR primer
acgttggatgtctgaggtcaggagtttgag

SEQ ID NO: 37 - DNA, 30 bp, Artificial Sequence
  Synthetic PCR primer
acgttggatggccaccatgtccagctaatt

SEQ ID NO: 38 - DNA, 30 bp, Artificial Sequence
  Synthetic PCR primer
acgttggatgagtgaggaaggcctattaac

SEQ ID NO: 39 - DNA, 30 bp, Artificial Sequence
  Synthetic PCR primer
acgttggatgatacctgagtcgaactcttg

SEQ ID NO: 40 - DNA, 30 bp, Artificial Sequence
  Synthetic PCR primer
acgttggatgttattgctcttgaacgtggc

SEQ ID NO: 41 - DNA, 30 bp, Artificial Sequence
  Synthetic PCR primer
acgttggatgtctgagaaaaagaattgggg

SEQ ID NO: 42 - DNA, 30 bp, Artificial Sequence; identical to SEQ ID NO: 15
  Synthetic PCR primer

SEQ ID NO: 43 - DNA, 30 bp, Artificial Sequence
  Synthetic PCR primer
acgttggatgagaccctgcttctttcaacg

SEQ ID NO: 44 - DNA, 30 bp, Artificial Sequence
  Synthetic PCR primer
acgttggatgattagctgggcatgctatcc

SEQ ID NO: 45 - DNA, 30 bp, Artificial Sequence
  Synthetic PCR primer
acgttggatgtgtagccttgaattcctggg

SEQ ID NO: 46 - DNA, 30 bp, Artificial Sequence
  Synthetic PCR primer
acgttggatgggcgctaaataatgcgccac

SEQ ID NO: 47 - DNA, 30 bp, Artificial Sequence
  Synthetic PCR primer
acgttggatgctgacctcgtgatctgcctg

SEQ ID NO: 48 - DNA, 30 bp, Artificial Sequence
  Synthetic PCR primer
acgttggatgggcgggtgggaagactctaa

SEQ ID NO: 49 - DNA, 30 bp, Artificial Sequence
  Synthetic PCR primer
acgttggatgtctttcactgtattcagatc

SEQ ID NO: 50 - DNA, 30 bp, Artificial Sequence
  Synthetic PCR primer
acgttggatgctccatttcaaaaaaaaaaa

SEQ ID NO: 51 - DNA, 30 bp, Artificial Sequence
  Synthetic PCR primer
acgttggatgccttagaggtatgtccagag

SEQ ID NO: 52 - DNA, 30 bp, Artificial Sequence
  Synthetic PCR primer
acgttggatgacacaagtaacaaacttgag

SEQ ID NO: 53 - DNA, 30 bp, Artificial Sequence
  Synthetic PCR primer
acgttggatggtgcttgaagaaattatgtg

SEQ ID NO: 54 - DNA, 30 bp, Artificial Sequence
  Synthetic PCR primer
acgttggatgtaagatacggaggatagagg

SEQ ID NO: 55 - DNA, 31 bp, Artificial Sequence
  Synthetic PCR primer
acgttggatggcatatagtctttgtggtgtg

SEQ ID NO: 56 - DNA, 31 bp, Artificial Sequence
  Synthetic PCR primer
acgttggatggtgagtgtacttaaataagtt

SEQ ID NO: 57 - DNA, 30 bp, Artificial Sequence
  Synthetic PCR primer
acgttggatggtttccctttgtgttttcag

SEQ ID NO: 58 - DNA, 30 bp, Artificial Sequence
  Synthetic PCR primer
acgttggatgtggtttaaatctttgtgagc

SEQ ID NO: 59 - DNA, 30 bp, Artificial Sequence
  Synthetic PCR primer
acgttggatgctgtgagtgtatctgaaaac

SEQ ID NO: 60 - DNA, 30 bp, Artificial Sequence
  Synthetic PCR primer
acgttggatggcttgttttatgaactggag

SEQ ID NO: 61 - DNA, 30 bp, Artificial Sequence
  Synthetic PCR primer
acgttggatgttaataccattggttaaatc

SEQ ID NO: 62 - DNA, 30 bp, Artificial Sequence
  Synthetic PCR primer
acgttggatgttcaggcaactcaagtaagc

SEQ ID NO: 63 - DNA, 30 bp, Artificial Sequence
  Synthetic PCR primer
acgttggatgtagagtgggtgtttacactg

SEQ ID NO: 64 - DNA, 30 bp, Artificial Sequence
  Synthetic PCR primer
acgttggatgtgatctcagctcactgtaac

SEQ ID NO: 65 - DNA, 30 bp, Artificial Sequence
  Synthetic PCR primer
acgttggatgtgtagtcccagctactcagg

SEQ ID NO: 66 - DNA, 30 bp, Artificial Sequence; identical to SEQ ID NO: 14
  Synthetic PCR primer

SEQ ID NO: 67 - DNA, 30 bp, Artificial Sequence; identical to SEQ ID NO: 15
  Synthetic PCR primer

SEQ ID NO: 68 - DNA, 30 bp, Artificial Sequence
  Synthetic PCR primer
acgttggatgcttcatagtagccaggctag

SEQ ID NO: 69 - DNA, 30 bp, Artificial Sequence
  Synthetic PCR primer
acgttggatgagcacatgaacagatgtgtc

SEQ ID NO: 70 - DNA, 18 bp, Artificial Sequence
  Synthetic PCR primer
ttatcaacctacaatgga

SEQ ID NO: 71 - DNA, 22 bp, Artificial Sequence
  Synthetic PCR primer
ttatggccatacgtaaaaagca

SEQ ID NO: 72 - DNA, 17 bp, Artificial Sequence
  Synthetic PCR primer
cggaggctttattcgta

SEQ ID NO: 73 - DNA, 24 bp, Artificial Sequence
  Synthetic PCR primer
aaagatttaaaccatcaaccaaat

SEQ ID NO: 74 - DNA, 23 bp, Artificial Sequence
  Synthetic PCR primer
gggtagtggtttcatgattttta

SEQ ID NO: 75 - DNA, 24 bp, Artificial Sequence
  Synthetic PCR primer
tccagctaattttttgtattttta

SEQ ID NO: 76 - DNA, 22 bp, Artificial Sequence
  Synthetic PCR primer
ctgagtcgaactcttgtataaa

SEQ ID NO: 77 - DNA, 23 bp, Artificial Sequence
  Synthetic PCR primer
gaaaaagaattggggattataac

SEQ ID NO: 78 - DNA, 21 bp, Artificial Sequence
  Synthetic PCR primer
cgaacatctacttcatttact

SEQ ID NO: 79 - DNA, 17 bp, Artificial Sequence
  Synthetic PCR primer
tcctcccacatcagcct

SEQ ID NO: 80 - DNA, 17 bp, Artificial Sequence
  Synthetic PCR primer
gcgtgagccaccacacc

SEQ ID NO: 81 - DNA, 24 bp, Artificial Sequence
  Synthetic PCR primer
cactgtattcagatcttcatattt

SEQ ID NO: 82 - DNA, 17 bp, Artificial Sequence
  Synthetic PCR primer
catcatactgcctctgg

SEQ ID NO: 83 - DNA, 24 bp, Artificial Sequence
  Synthetic PCR primer
ttatgtgttctctatttattgact

SEQ ID NO: 84 - DNA, 17 bp, Artificial Sequence
  Synthetic PCR primer
tttgtggtgtgggattc

SEQ ID NO: 85 - DNA, 20 bp, Artificial Sequence
  Synthetic PCR primer
tattttccatttcctctctg

SEQ ID NO: 86 - DNA, 21 bp, Artificial Sequence
  Synthetic PCR primer
aagggaaactcatgatttcta

SEQ ID NO: 87 - DNA, 17 bp, Artificial Sequence
  Synthetic PCR primer
aggctttttgtagcagt

SEQ ID NO: 88 - DNA, 24 bp, Artificial Sequence
  Synthetic PCR primer
gtgggtgtttacactgtttaatac

SEQ ID NO: 89 - DNA, 20 bp, Artificial Sequence
  Synthetic PCR primer
atgagaatcacttgaacctg

SEQ ID NO: 90 - DNA, 23 bp, Artificial Sequence
  Synthetic PCR primer
cagggtcaatgactgtatattac

SEQ ID NO: 91 - DNA, 19 bp, Artificial Sequence
  Synthetic PCR primer
agatgtgtcacaaatgcaa

SEQ ID NO: 92 - DNA, 30 bp, Artificial Sequence
  Synthetic PCR primer
acgttggatgccctaacactactccttgtc

SEQ ID NO: 93 - DNA, 30 bp, Artificial Sequence
  Synthetic PCR primer
acgttggatgccaacacttcttggagtctg

SEQ ID NO: 94 - DNA, 30 bp, Artificial Sequence
  Synthetic PCR primer
acgttggatgagccacattctcagatactg

SEQ ID NO: 95 - DNA, 30 bp, Artificial Sequence
  Synthetic PCR primer
acgttggatgggaaaagaaggaagaagaag

SEQ ID NO: 96 - DNA, 30 bp, Artificial Sequence
  Synthetic PCR primer
acgttggatggagacagaaaagtggtggac

SEQ ID NO: 97 - DNA, 30 bp, Artificial Sequence
  Synthetic PCR primer
acgttggatgcctttaagaaggcccttgtg

SEQ ID NO: 98 - DNA, 30 bp, Artificial Sequence
  Synthetic PCR primer
acgttggatgcacaaattcagtggccaagc

SEQ ID NO: 99 - DNA, 30 bp, Artificial Sequence
  Synthetic PCR primer
acgttggatgcttgttgtggacacctactg

SEQ ID NO: 100 - DNA, 30 bp, Artificial Sequence
  Synthetic PCR primer
acgttggatgcaggagtgagaagttctttg

SEQ ID NO: 101 - DNA, 30 bp, Artificial Sequence
  Synthetic PCR primer
acgttggatgtgctgattggtctatgggtg

SEQ ID NO: 102 - DNA, 30 bp, Artificial Sequence
  Synthetic PCR primer
acgttggatgtctcacactgaggcctgtag

SEQ ID NO: 103 - DNA, 30 bp, Artificial Sequence
  Synthetic PCR primer
acgttggatgtttgctgcacccatcaactc

SEQ ID NO: 104 - DNA, 30 bp, Artificial Sequence
  Synthetic PCR primer
acgttggatgcttccctccttttctccttc

SEQ ID NO: 105 - DNA, 30 bp, Artificial Sequence
  Synthetic PCR primer
acgttggatgcaagatccaatccagaagac

SEQ ID NO: 106 - DNA, 30 bp, Artificial Sequence
  Synthetic PCR primer
acgttggatgagattgctgccactacacac

SEQ ID NO: 107 - DNA, 31 bp, Artificial Sequence
  Synthetic PCR primer
acgttggatgctcttggcattcttaactcag

SEQ ID NO: 108 - DNA, 30 bp, Artificial Sequence
  Synthetic PCR primer
acgttggatgtctgcagtttctctctcaac

SEQ ID NO: 109 - DNA, 30 bp, Artificial Sequence
  Synthetic PCR primer
acgttggatgaccaaatccaagatgtaggg

SEQ ID NO: 110 - DNA, 30 bp, Artificial Sequence
  Synthetic PCR primer
acgttggatgcagcagaaacttgatgatgg

SEQ ID NO: 111 - DNA, 30 bp, Artificial Sequence
  Synthetic PCR primer
acgttggatgagacactgagactctggagg

SEQ ID NO: 112 - DNA, 30 bp, Artificial Sequence
  Synthetic PCR primer
acgttggatggtgtatacacaagggccttc

SEQ ID NO: 113 - DNA, 30 bp, Artificial Sequence
  Synthetic PCR primer
acgttggatgctgattgctgtttctgttac

SEQ ID NO: 114 - DNA, 30 bp, Artificial Sequence
  Synthetic PCR primer
acgttggatgtccacactgtgaacagagac

SEQ ID NO: 115 - DNA, 30 bp, Artificial Sequence
  Synthetic PCR primer
acgttggatgagtctaaaaaggctgtcagg

SEQ ID NO: 116 - DNA, 31 bp, Artificial Sequence
  Synthetic PCR primer
acgttggatggcagctcaatttttaggaacc

SEQ ID NO: 117 - DNA, 30 bp, Artificial Sequence
  Synthetic PCR primer
acgttggatgcccttgtacactgttgcatg

SEQ ID NO: 118 - DNA, 30 bp, Artificial Sequence
  Synthetic PCR primer
acgttggatgtagattaattattggttggc

SEQ ID NO: 119 - DNA, 30 bp, Artificial Sequence
  Synthetic PCR primer
acgttggatggccacctccaaaattagatc

SEQ ID NO: 120 - DNA, 30 bp, Artificial Sequence
  Synthetic PCR primer
acgttggatgttcctgggaatggatttcag

SEQ ID NO: 121 - DNA, 30 bp, Artificial Sequence
  Synthetic PCR primer
acgttggatggcaaacgtgcacatttgcac

SEQ ID NO: 122 - DNA, 30 bp, Artificial Sequence
  Synthetic PCR primer
acgttggatgtgcatgactacacaaagaag

SEQ ID NO: 123 - DNA, 30 bp, Artificial Sequence
  Synthetic PCR primer
acgttggatggcaaaatcctacattgaggc

SEQ ID NO: 124 - DNA, 30 bp, Artificial Sequence
  Synthetic PCR primer
acgttggatgatgtctctgttcacagtgtg

SEQ ID NO: 125 - DNA, 31 bp, Artificial Sequence
  Synthetic PCR primer
acgttggatgctggcaaatagcaatctaaac

SEQ ID NO: 126 - DNA, 30 bp, Artificial Sequence; identical to SEQ ID NO: 120
  Synthetic PCR primer

SEQ ID NO: 127 - DNA, 30 bp, Artificial Sequence; identical to SEQ ID NO: 121
  Synthetic PCR primer

SEQ ID NO: 128 - DNA, 31 bp, Artificial Sequence
  Synthetic PCR primer
acgttggatggtactgaaactctgagcattc

SEQ ID NO: 129 - DNA, 31 bp, Artificial Sequence
  Synthetic PCR primer
acgttggatgcatcttatctgtttaccatac

SEQ ID NO: 130 - DNA, 31 bp, Artificial Sequence
  Synthetic PCR primer
acgttggatggctgtatatacgagttaatgg

SEQ ID NO: 131 - DNA, 31 bp, Artificial Sequence
  Synthetic PCR primer
acgttggatgagtggaggtggaggtgaggct

SEQ ID NO: 132 - DNA, 30 bp, Artificial Sequence
  Synthetic PCR primer
acgttggatgaaatgccaatagcgccaagg

SEQ ID NO: 133 - DNA, 30 bp, Artificial Sequence
  Synthetic PCR primer
acgttggatgagtagaagagataagcctgg

SEQ ID NO: 134 - DNA, 30 bp, Artificial Sequence
  Synthetic PCR primer
acgttggatgttttgcctcaccaagattgc

SEQ ID NO: 135 - DNA, 30 bp, Artificial Sequence
  Synthetic PCR primer
acgttggatgacaatttcattgaggagagg

SEQ ID NO: 136 - DNA, 31 bp, Artificial Sequence
  Synthetic PCR primer
acgttggatggatggttgatcacttgtgtag

SEQ ID NO: 137 - DNA, 30 bp, Artificial Sequence
  Synthetic PCR primer
acgttggatgcttacctcctctcctcaatg

SEQ ID NO: 138 - DNA, 31 bp, Artificial Sequence
  Synthetic PCR primer
acgttggatggttgctaaagtagtttcagcc

SEQ ID NO: 139 - DNA, 30 bp, Artificial Sequence
  Synthetic PCR primer
acgttggatgaccaaagagcttgtcccatc

SEQ ID NO: 140 - DNA, 31 bp, Artificial Sequence
  Synthetic PCR primer
acgttggatggtgctttagaatgtaacacag

SEQ ID NO: 141 - DNA, 30 bp, Artificial Sequence
  Synthetic PCR primer
acgttggatgtggaattgcacccttgcttg

SEQ ID NO: 142 - DNA, 30 bp, Artificial Sequence
  Synthetic PCR primer
acgttggatgtatcttatctagcaggcaac

SEQ ID NO: 143 - DNA, 30 bp, Artificial Sequence
  Synthetic PCR primer
acgttggatgactaagatcacaggcctgag

SEQ ID NO: 144 - DNA, 30 bp, Artificial Sequence
  Synthetic PCR primer
acgttggatgggttgggtgtatgataggag

SEQ ID NO: 145 - DNA, 30 bp, Artificial Sequence
  Synthetic PCR primer
acgttggatgagcatggctaatctgtctgg

SEQ ID NO: 146 - DNA, 31 bp, Artificial Sequence
  Synthetic PCR primer
acgttggatgctttattgactgctttcaatc

SEQ ID NO: 147 - DNA, 30 bp, Artificial Sequence
  Synthetic PCR primer
acgttggatgagtgattacgagcctgtacc

SEQ ID NO: 148 - DNA, 30 bp, Artificial Sequence
  Synthetic PCR primer
acgttggatgttaggtgcattgatgctctg

SEQ ID NO: 149 - DNA, 30 bp, Artificial Sequence
  Synthetic PCR primer
acgttggatgctcaggcacagaaaagattc

SEQ ID NO: 150 - DNA, 30 bp, Artificial Sequence
  Synthetic PCR primer
acgttggatgctgtggtctcaggtcacaaa

SEQ ID NO: 151 - DNA, 30 bp, Artificial Sequence
  Synthetic PCR primer
acgttggatgatgcacctaaaacaagagtc

SEQ ID NO: 152 - DNA, 30 bp, Artificial Sequence
  Synthetic PCR primer
acgttggatgcataatttaccttcctggcc

SEQ ID NO: 153 - DNA, 30 bp, Artificial Sequence
  Synthetic PCR primer
acgttggatgcaaatttgtgacctgagacc

SEQ ID NO: 154 - DNA, 30 bp, Artificial Sequence
  Synthetic PCR primer
acgttggatgaccatcagaaccagtatacc

SEQ ID NO: 155 - DNA, 30 bp, Artificial Sequence
  Synthetic PCR primer
acgttggatggatggccagaattgatgtac

SEQ ID NO: 156 - DNA, 30 bp, Artificial Sequence
  Synthetic PCR primer
acgttggatgcctttccgctgtatctcttg

SEQ ID NO: 157 - DNA, 30 bp, Artificial Sequence
  Synthetic PCR primer
acgttggatgggtacaaggaagatcctcag

SEQ ID NO: 158 - DNA, 30 bp, Artificial Sequence
  Synthetic PCR primer
acgttggatgattgagaaagcagctgcttg

SEQ ID NO: 159 - DNA, 30 bp, Artificial Sequence
  Synthetic PCR primer
acgttggatgccaacctcccaaatacatcc

SEQ ID NO: 160 - DNA, 30 bp, Artificial Sequence
  Synthetic PCR primer
acgttggatgataaaataggtctggggctg

SEQ ID NO: 161 - DNA, 30 bp, Artificial Sequence
  Synthetic PCR primer
acgttggatggtttgcttactctggtactg

SEQ ID NO: 162 - DNA, 30 bp, Artificial Sequence
  Synthetic PCR primer
acgttggatggaaatgtaacgcaaagaggg

SEQ ID NO: 163 - DNA, 30 bp, Artificial Sequence
  Synthetic PCR primer
acgttggatggttgaaacattgtctgctag

SEQ ID NO: 164 - DNA, 30 bp, Artificial Sequence
  Synthetic PCR primer
acgttggatggtaccataaaatacaatacc

SEQ ID NO: 165 - DNA, 30 bp, Artificial Sequence
  Synthetic PCR primer
acgttggatgtggtcccccagtcatcttaa

SEQ ID NO: 166 - DNA, 30 bp, Artificial Sequence
  Synthetic PCR primer
acgttggatgtagcaaaaccctgcctctac

SEQ ID NO: 167 - DNA, 30 bp, Artificial Sequence
  Synthetic PCR primer
acgttggatgaggtcagtgttctggtattg

SEQ ID NO: 168 - DNA, 30 bp, Artificial Sequence; identical to SEQ ID NO: 167
  Synthetic PCR primer

SEQ ID NO: 169 - DNA, 30 bp, Artificial Sequence
  Synthetic PCR primer
acgttggatgagcctgggcaacatagcaaa

SEQ ID NO: 170 - DNA, 30 bp, Artificial Sequence
  Synthetic PCR primer
acgttggatgcagacagatgtttagctacc

SEQ ID NO: 171 - DNA, 30 bp, Artificial Sequence
  Synthetic PCR primer
acgttggatgtgaagttgtggattcccagc

SEQ ID NO: 172 - DNA, 30 bp, Artificial Sequence
  Synthetic PCR primer
acgttggatggcttgaccaatcatacttcc

SEQ ID NO: 173 - DNA, 31 bp, Artificial Sequence
  Synthetic PCR primer
acgttggatggaaacaaattgctctgagtcc

SEQ ID NO: 174 - DNA, 30 bp, Artificial Sequence
  Synthetic PCR primer
acgttggatgtcttcagggcagtaggattc

SEQ ID NO: 175 - DNA, 30 bp, Artificial Sequence
  Synthetic PCR primer
acgttggatgcacatgtgtttaatacaagg

SEQ ID NO: 176 - DNA, 30 bp, Artificial Sequence
  Synthetic PCR primer
acgttggatgagcctgtaaatgatagagcc

SEQ ID NO: 177 - DNA, 30 bp, Artificial Sequence
  Synthetic PCR primer
acgttggatggatgtcacagtacagcaatg

SEQ ID NO: 178 - DNA, 31 bp, Artificial Sequence
  Synthetic PCR primer
acgttggatggatagaaaagttagagaaatg

SEQ ID NO: 179 - DNA, 30 bp, Artificial Sequence
  Synthetic PCR primer
acgttggatgaaggtcacaccactgcactc

SEQ ID NO: 180 - DNA, 31 bp, Artificial Sequence
  Synthetic PCR primer
acgttggatgccagtttacactggatatttc

SEQ ID NO: 181 - DNA, 30 bp, Artificial Sequence
  Synthetic PCR primer
acgttggatgttgactagctgctagaaggg

SEQ ID NO: 182 - DNA, 31 bp, Artificial Sequence; identical to SEQ ID NO: 180
  Synthetic PCR primer

SEQ ID NO: 183 - DNA, 30 bp, Artificial Sequence; identical to SEQ ID NO: 181
  Synthetic PCR primer

SEQ ID NO: 184 - DNA, 30 bp, Artificial Sequence
  Synthetic PCR primer
acgttggatgttaagtaccgggaaattcag

SEQ ID NO: 185 - DNA, 30 bp, Artificial Sequence
  Synthetic PCR primer
acgttggatgtcatatacctacgcaggctc

SEQ ID NO: 186 - DNA, 30 bp, Artificial Sequence
  Synthetic PCR primer
acgttggatgcttttagaagtagtaggggc

SEQ ID NO: 187 - DNA, 30 bp, Artificial Sequence
  Synthetic PCR primer
acgttggatgagactccaagaagtgttggg

SEQ ID NO: 188 - DNA, 30 bp, Artificial Sequence
  Synthetic PCR primer
acgttggatgaaaggtggttttgccagctg

SEQ ID NO: 189 - DNA, 30 bp, Artificial Sequence
  Synthetic PCR primer
acgttggatgctcagtctcctgaagtgctg

SEQ ID NO: 190 - DNA, 30 bp, Artificial Sequence
  Synthetic PCR primer
acgttggatgcctatctgcatgttgcttac

SEQ ID NO: 191 - DNA, 30 bp, Artificial Sequence
  Synthetic PCR primer
acgttggatggactcttgggagtacaaatg

SEQ ID NO: 192 - DNA, 31 bp, Artificial Sequence
  Synthetic PCR primer
acgttggatgcacaaccagaatttgtaagtc

SEQ ID NO: 193 - DNA, 30 bp, Artificial Sequence
  Synthetic PCR primer
acgttggatgcacacgcatgcatcatctac

SEQ ID NO: 194 - DNA, 30 bp, Artificial Sequence
  Synthetic PCR primer
acgttggatgtggttttcagtcaaagctgc

SEQ ID NO: 195 - DNA, 30 bp, Artificial Sequence
  Synthetic PCR primer
acgttggatgctgagatctttcttcctgac

SEQ ID NO: 196 - DNA, 30 bp, Artificial Sequence
  Synthetic PCR primer
acgttggatggttgcagagggaagcatttc

SEQ ID NO: 197 - DNA, 30 bp, Artificial Sequence
  Synthetic PCR primer
acgttggatgcacttgtgaccaggtcacta

SEQ ID NO: 198 - DNA, 30 bp, Artificial Sequence
  Synthetic PCR primer
acgttggatgctatcccagggctatgtttg

SEQ ID NO: 199 - DNA, 30 bp, Artificial Sequence
  Synthetic PCR primer
acgttggatggaagtggaggatgagttgtg

SEQ ID NO: 200 - DNA, 31 bp, Artificial Sequence
  Synthetic PCR primer
acgttggatgcagcacttacttgtcatgtag

SEQ ID NO: 201 - DNA, 30 bp, Artificial Sequence
  Synthetic PCR primer
acgttggatgcataaccaatttgtcttaac

SEQ ID NO: 202 - DNA, 30 bp, Artificial Sequence
  Synthetic PCR primer
acgttggatgtcagtatgaagcaagcagcc

SEQ ID NO: 203 - DNA, 30 bp, Artificial Sequence
  Synthetic PCR primer
acgttggatgatgtcgctatactctgtagg

SEQ ID NO: 204 - DNA, 30 bp, Artificial Sequence
  Synthetic PCR primer
acgttggatggtagctgagaagatgctcac

SEQ ID NO: 205 - DNA, 30 bp, Artificial Sequence
  Synthetic PCR primer
acgttggatgatagctgttccagtctcttg

SEQ ID NO: 206 - DNA, 30 bp, Artificial Sequence
  Synthetic PCR primer
acgttggatgatacggtaaaggtagtctgg

SEQ ID NO: 207 - DNA, 30 bp, Artificial Sequence
  Synthetic PCR primer
acgttggatgttacctgtattgccctctcg

SEQ ID NO: 208 - DNA, 30 bp, Artificial Sequence
  Synthetic PCR primer
acgttggatgctcaagagcccatcatcatc

SEQ ID NO: 209 - DNA, 30 bp, Artificial Sequence
  Synthetic PCR primer
acgttggatggacaggctcagatatttcag

SEQ ID NO: 210 - DNA, 18 bp, Artificial Sequence
  Synthetic PCR primer
attcagcacaagttgtca

SEQ ID NO: 211 - DNA, 19 bp, Artificial Sequence
  Synthetic PCR primer
gaaagacctagaaagaaaa

SEQ ID NO: 212 - DNA, 18 bp, Artificial Sequence
  Synthetic PCR primer
ctctctctttctctcact

SEQ ID NO: 213 - DNA, 18 bp, Artificial Sequence
  Synthetic PCR primer
gtctggagatccgaattt

SEQ ID NO: 214 - DNA, 17 bp, Artificial Sequence
  Synthetic PCR primer
gcaccatctgattggcc

SEQ ID NO: 215 - DNA, 17 bp, Artificial Sequence
  Synthetic PCR primer
cccaacactatcccttc

SEQ ID NO: 216 - DNA, 24 bp, Artificial Sequence
  Synthetic PCR primer
atccagaagacaatattgcattta

SEQ ID NO: 217 - DNA, 17 bp, Artificial Sequence
  Synthetic PCR primer
gtattgctttgttgccc

SEQ ID NO: 218 - DNA, 18 bp, Artificial Sequence
  Synthetic PCR primer
ggtaaagagatgaagtgc

SEQ ID NO: 219 - DNA, 17 bp, Artificial Sequence
  Synthetic PCR primer
cccagatatcctcggaa

SEQ ID NO: 220 - DNA, 22 bp, Artificial Sequence
  Synthetic PCR primer
tgttacttattacattgtccaa

SEQ ID NO: 221 - DNA, 21 bp, Artificial Sequence
  Synthetic PCR primer
ttatattcactctgaaatccc

SEQ ID NO: 222 - DNA, 19 bp, Artificial Sequence
  Synthetic PCR primer
cactgttgcatgaaatgta

SEQ ID NO: 223 - DNA, 20 bp, Artificial Sequence
  Synthetic PCR primer
cctgctacaaagggacctca

SEQ ID NO: 224 - DNA, 22 bp, Artificial Sequence
  Synthetic PCR primer
acagagttttaaacctcctaca

SEQ ID NO: 225 - DNA, 21 bp, Artificial Sequence
  Synthetic PCR primer
tacattgaggcagtttgtgct

SEQ ID NO: 226 - DNA, 24 bp, Artificial Sequence
  Synthetic PCR primer
agcaatctaaacatgagattgagc

SEQ ID NO: 227 - DNA, 22 bp, Artificial Sequence
  Synthetic PCR primer
acagagttttaaacctcctaca

SEQ ID NO: 228 - DNA, 24 bp, Artificial Sequence
  Synthetic PCR primer
cttatctgtttaccatacaatcta

SEQ ID NO: 229 - DNA, 19 bp, Artificial Sequence
  Synthetic PCR primer
caacacaaaatgccaatag

SEQ ID NO: 230 - DNA, 22 bp, Artificial Sequence
  Synthetic PCR primer
tgtggctgtatatacgagttaa

SEQ ID NO: 231 - DNA, 17 bp, Artificial Sequence
  Synthetic PCR primer
ttgaggagaggaggtaa

SEQ ID NO: 232 - DNA, 24 bp, Artificial Sequence
  Synthetic PCR primer
catcaatctaatctcatttcctat

SEQ ID NO: 233 - DNA, 20 bp, Artificial Sequence
  Synthetic PCR primer
tgggtggtccttttctgata

SEQ ID NO: 234 - DNA, 20 bp, Artificial Sequence
  Synthetic PCR primer
taatcatgtggaatttccag

SEQ ID NO: 235 - DNA, 17 bp, Artificial Sequence
  Synthetic PCR primer
caggcctgagccactgt

SEQ ID NO: 236 - DNA, 22 bp, Artificial Sequence
  Synthetic PCR primer
ctaatctgtctggttaatagaa

SEQ ID NO: 237 - DNA, 19 bp, Artificial Sequence
  Synthetic PCR primer
gcaaaagcaaaagtaagct

SEQ ID NO: 238 - DNA, 24 bp, Artificial Sequence
  Synthetic PCR primer
aaacaatggtaatctagagtaagc

SEQ ID NO: 239 - DNA, 23 bp, Artificial Sequence
  Synthetic PCR primer
tgattcaatttctgttgactact

SEQ ID NO: 240 - DNA, 20 bp, Artificial Sequence
  Synthetic PCR primer
gtgacctgagaccacagatc

SEQ ID NO: 241 - DNA, 17 bp, Artificial Sequence
  Synthetic PCR primer
tccaaataagaagccct

SEQ ID NO: 242 - DNA, 24 bp, Artificial Sequence
  Synthetic PCR primer
cagtgtaataaattatcagttcat

SEQ ID NO: 243 - DNA, 23 bp, Artificial Sequence
  Synthetic PCR primer
tggagttcaatataaagatacac

SEQ ID NO: 244 - DNA, 20 bp, Artificial Sequence
  Synthetic PCR primer
tgttttcagttttatttgcc

SEQ ID NO: 245 - DNA, 17 bp, Artificial Sequence
  Synthetic PCR primer
ttgtctgctagccattt

SEQ ID NO: 246 - DNA, 22 bp, Artificial Sequence
  Synthetic PCR primer
aatcagtgtttctttaaaggtc

SEQ ID NO: 247 - DNA, 23 bp, Artificial Sequence
  Synthetic PCR primer
ctggtattgtattttatggtact

SEQ ID NO: 248 - DNA, 21 bp, Artificial Sequence
  Synthetic PCR primer
gggcaacatagcaaaaccctg

SEQ ID NO: 249 - DNA, 17 bp, Artificial Sequence
  Synthetic PCR primer
ttcccagccctacttac

SEQ ID NO: 250 - DNA, 19 bp, Artificial Sequence
  Synthetic PCR primer
ctgagtcctaaaaaaaggt

SEQ ID NO: 251 - DNA, 21 bp, Artificial Sequence
  Synthetic PCR primer
ttaatacaaggaaattccagc

SEQ ID NO: 252 - DNA, 22 bp, Artificial Sequence
  Synthetic PCR primer
agaatttgaagacataaaaacc

SEQ ID NO: 253 - DNA, 17 bp, Artificial Sequence
  Synthetic PCR primer
gcgacagagcaagactc

SEQ ID NO: 254 - DNA, 20 bp, Artificial Sequence
  Synthetic PCR primer
gggtcagagaactctattaa

SEQ ID NO: 255 - DNA, 22 bp, Artificial Sequence
  Synthetic PCR primer
agagaactctattaagtaggtc

SEQ ID NO: 256 - DNA, 18 bp, Artificial Sequence
  Synthetic PCR primer
ctcatggatctgtcttac

SEQ ID NO: 257 - DNA, 22 bp, Artificial Sequence
  Synthetic PCR primer
ggggaaaaaaaaggtcatatta

SEQ ID NO: 258 - DNA, 21 bp, Artificial Sequence
  Synthetic PCR primer
ctgaagtgctgggattatggg

SEQ ID NO: 259 - DNA, 19 bp, Artificial Sequence
  Synthetic PCR primer
ttttctgtgctttctttgt

SEQ ID NO: 260 - DNA, 20 bp, Artificial Sequence
  Synthetic PCR primer
catctactctctttgaagtt

SEQ ID NO: 261 - DNA, 23 bp, Artificial Sequence
  Synthetic PCR primer
ctttcttcctgacttacaaattc

SEQ ID NO: 262 - DNA, 22 bp, Artificial Sequence
  Synthetic PCR primer
gtgtttttgttgacatatcaat

SEQ ID NO: 263 - DNA, 21 bp, Artificial Sequence
  Synthetic PCR primer
ggaggatgagttgtgttgact

SEQ ID NO: 264 - DNA, 24 bp, Artificial Sequence
  Synthetic PCR primer
ttgtcttaactactataaactgaa

SEQ ID NO: 265 - DNA, 24 bp, Artificial Sequence
  Synthetic PCR primer
gctatactctgtaggagtttatct

SEQ ID NO: 266 - DNA, 20 bp, Artificial Sequence
  Synthetic PCR primer
cagtctcttgattttaagga

SEQ ID NO: 267 - DNA, 17 bp, Artificial Sequence
  Synthetic PCR primer
ctcgtacttttgcccac

SEQ ID NO: 268 - DNA, 21 bp, Artificial Sequence
  Synthetic PCR primer
atttcagtgatataggagtct

SEQ ID NO: 269 - DNA, 30 bp, Artificial Sequence
  Synthetic PCR primer
acgttggatggaaaccaagataggaaatgg

SEQ ID NO: 270 - DNA, 30 bp, Artificial Sequence
  Synthetic PCR primer
acgttggatgctcagtgccagaaataccag

SEQ ID NO: 271 - DNA, 30 bp, Artificial Sequence
  Synthetic PCR primer
acgttggatgtcctgtttctaagcagggag

SEQ ID NO: 272 - DNA, 30 bp, Artificial Sequence
  Synthetic PCR primer
acgttggatgatcaggactacctgagcaac

SEQ ID NO: 273 - DNA, 31 bp, Artificial Sequence
  Synthetic PCR primer
acgttggatgtccagtgaggcctccctccaa

SEQ ID NO: 274 - DNA, 30 bp, Artificial Sequence
  Synthetic PCR primer
acgttggatgcagcaacccaaagcaacacg

SEQ ID NO: 275 - DNA, 30 bp, Artificial Sequence
  Synthetic PCR primer
acgttggatgtagccacgccattattggag

SEQ ID NO: 276 - DNA, 30 bp, Artificial Sequence
  Synthetic PCR primer
acgttggatgcttcacatccctcctcaaag

SEQ ID NO: 277 - DNA, 30 bp, Artificial Sequence
  Synthetic PCR primer
acgttggatgatcctaaccaggtctgatgg

SEQ ID NO: 278 - DNA, 30 bp, Artificial Sequence
  Synthetic PCR primer
acgttggatgaagggccaagcaatgctttg

SEQ ID NO: 279 - DNA, 30 bp, Artificial Sequence
  Synthetic PCR primer
acgttggatgggtagggctgtctgtttcat

SEQ ID NO: 280 - DNA, 30 bp, Artificial Sequence
  Synthetic PCR primer
acgttggatgatgcctgccacattgggtaa

SEQ ID NO: 281 - DNA, 30 bp, Artificial Sequence
  Synthetic PCR primer
acgttggatgaggtctggcactgctaaatg

SEQ ID NO: 282 - DNA, 30 bp, Artificial Sequence
  Synthetic PCR primer
acgttggatgccttgtgaacttccaacctg

SEQ ID NO: 283 - DNA, 30 bp, Artificial Sequence
  Synthetic PCR primer
acgttggatgcctagccaacatccttttcc

SEQ ID NO: 284 - DNA, 30 bp, Artificial Sequence
  Synthetic PCR primer
acgttggatgagcaaccagtctagttttcg

SEQ ID NO: 285 - DNA, 30 bp, Artificial Sequence
  Synthetic PCR primer
acgttggatgcccttgttttagaggttggg

SEQ ID NO: 286 - DNA, 30 bp, Artificial Sequence
  Synthetic PCR primer
acgttggatgtgtgatccagacatcagctc

SEQ ID NO: 287 - DNA, 30 bp, Artificial Sequence
  Synthetic PCR primer
acgttggatgcaagaagggcatttctaccc

SEQ ID NO: 288 - DNA, 30 bp, Artificial Sequence
  Synthetic PCR primer
acgttggatgcaatgctgctgacatcagac

SEQ ID NO: 289 - DNA, 30 bp, Artificial Sequence
  Synthetic PCR primer
acgttggatggggtactcttagctgagaac

SEQ ID NO: 290 - DNA, 30 bp, Artificial Sequence
  Synthetic PCR primer
acgttggatgtacagggattgtgatgtggg

SEQ ID NO: 291 - DNA, 30 bp, Artificial Sequence
  Synthetic PCR primer
acgttggatggatttgttctggcaggaatg

SEQ ID NO: 292 - DNA, 30 bp, Artificial Sequence
  Synthetic PCR primer
acgttggatgacaaaccactaaactttcag

SEQ ID NO: 293 - DNA, 30 bp, Artificial Sequence
  Synthetic PCR primer
acgttggatggatcatccaagtatgctccc

SEQ ID NO: 294 - DNA, 30 bp, Artificial Sequence
  Synthetic PCR primer
acgttggatggcaaaacccagtgccaaaac

SEQ ID NO: 295 - DNA, 30 bp, Artificial Sequence
  Synthetic PCR primer
acgttggatgaaagggtacccagacttcac

SEQ ID NO: 296 - DNA, 30 bp, Artificial Sequence
  Synthetic PCR primer
acgttggatgtggggagaactttggtcaac

SEQ ID NO: 297 - DNA, 30 bp, Artificial Sequence
  Synthetic PCR primer
acgttggatggggttctctcttgacagatg

SEQ ID NO: 298 - DNA, 30 bp, Artificial Sequence
  Synthetic PCR primer
acgttggatgtgttctcaccctgttctgtt

SEQ ID NO: 299 - DNA, 30 bp, Artificial Sequence
  Synthetic PCR primer
acgttggatggctagaaatcaccagcaacc

SEQ ID NO: 300 - DNA, 30 bp, Artificial Sequence
  Synthetic PCR primer
acgttggatgtcatgtaggttggctctgac

SEQ ID NO: 301 - DNA, 30 bp, Artificial Sequence
  Synthetic PCR primer
acgttggatgaccattatcatcttcccagg

SEQ ID NO: 302 - DNA, 31 bp, Artificial Sequence
  Synthetic PCR primer
acgttggatgccttatctctctaagacatgc

SEQ ID NO: 303 - DNA, 30 bp, Artificial Sequence
  Synthetic PCR primer
acgttggatgactcgactagctagtcttgg

SEQ ID NO: 304 - DNA, 30 bp, Artificial Sequence
  Synthetic PCR primer
acgttggatgaaagcaatccagcggacaag

SEQ ID NO: 305 - DNA, 30 bp, Artificial Sequence
  Synthetic PCR primer
acgttggatgtccccggaatgatacatgac

SEQ ID NO: 306 - DNA, 30 bp, Artificial Sequence
  Synthetic PCR primer
acgttggatgaacatgattaaggataaagc

SEQ ID NO: 307 - DNA, 30 bp, Artificial Sequence
  Synthetic PCR primer
acgttggatgaagtcactaaccccacacac

SEQ ID NO: 308 - DNA, 30 bp, Artificial Sequence
  Synthetic PCR primer
acgttggatgccagggtgtgttctaatacg

SEQ ID NO: 309 - DNA, 30 bp, Artificial Sequence
  Synthetic PCR primer
acgttggatgtcagagatatgcactgcaag

SEQ ID NO: 310 - DNA, 30 bp, Artificial Sequence
  Synthetic PCR primer
acgttggatgcacaccctggcatgaatgtg

SEQ ID NO: 311 - DNA, 30 bp, Artificial Sequence
  Synthetic PCR primer
acgttggatgcactggatttggcaagaagg

SEQ ID NO: 312 - DNA, 30 bp, Artificial Sequence
  Synthetic PCR primer
acgttggatgtacatgatcctcccctctac

SEQ ID NO: 313 - DNA, 30 bp, Artificial Sequence
  Synthetic PCR primer
acgttggatgcctgcaaaatccctcatacc

SEQ ID NO: 314 - DNA, 30 bp, Artificial Sequence
  Synthetic PCR primer
acgttggatgatagaagcgtgaccttaccc

SEQ ID NO: 315 - DNA, 30 bp, Artificial Sequence
  Synthetic PCR primer
acgttggatgggtatgagggattttgcagg

SEQ ID NO: 316 - DNA, 30 bp, Artificial Sequence
  Synthetic PCR primer
acgttggatgactggactcacccacataag

SEQ ID NO: 317 - DNA, 30 bp, Artificial Sequence
  Synthetic PCR primer
acgttggatgccagtgtaatcacaagggtc

SEQ ID NO: 318 - DNA, 30 bp, Artificial Sequence
  Synthetic PCR primer
acgttggatgtgtgtcacttctacctccac

SEQ ID NO: 319 - DNA, 30 bp, Artificial Sequence
  Synthetic PCR primer
acgttggatggtgctggctgcctagttcta

SEQ ID NO: 320 - DNA, 30 bp, Artificial Sequence
  Synthetic PCR primer
acgttggatgggcttctcaattcagatggg

SEQ ID NO: 321 - DNA, 30 bp, Artificial Sequence
  Synthetic PCR primer
acgttggatgccacaaaagcacgtgatttc

SEQ ID NO: 322 - DNA, 30 bp, Artificial Sequence
  Synthetic PCR primer
acgttggatgttatttgagctctgatagtg

SEQ ID NO: 323 - DNA, 30 bp, Artificial Sequence
  Synthetic PCR primer
acgttggatggctccagtctctaatcacac

SEQ ID NO: 324 - DNA, 30 bp, Artificial Sequence
  Synthetic PCR primer
acgttggatgcaaagttctctgcctgagtg

SEQ ID NO: 325 - DNA, 30 bp, Artificial Sequence
  Synthetic PCR primer
acgttggatgtaatcccagcactttgggag

SEQ ID NO: 326 - DNA, 30 bp, Artificial Sequence
  Synthetic PCR primer
acgttggatgaggctgatcttgaactcctg

SEQ ID NO: 327 - DNA, 30 bp, Artificial Sequence
  Synthetic PCR primer
acgttggatgcaaacaaggtcccagcattc

SEQ ID NO: 328 - DNA, 30 bp, Artificial Sequence
  Synthetic PCR primer
acgttggatgtcctgactctctcaaaaccc

SEQ ID NO: 329 - DNA, 30 bp, Artificial Sequence
  Synthetic PCR primer
acgttggatgaaactctctcgttgctgtgg

SEQ ID NO: 330 - DNA, 30 bp, Artificial Sequence
  Synthetic PCR primer
acgttggatgaaagcccctctagcaaaagg

SEQ ID NO: 331 - DNA, 30 bp, Artificial Sequence
  Synthetic PCR primer
acgttggatgctgcctgcaagttcccattg

SEQ ID NO: 332 - DNA, 30 bp, Artificial Sequence
  Synthetic PCR primer
acgttggatgtacaggcactggcgaagaag

SEQ ID NO: 333 - DNA, 30 bp, Artificial Sequence
  Synthetic PCR primer
acgttggatggaaagtgtccttagcttgcc

SEQ ID NO: 334 - DNA, 30 bp, Artificial Sequence
  Synthetic PCR primer
acgttggatgtgagatggatctggagccac

SEQ ID NO: 335 - DNA, 30 bp, Artificial Sequence
  Synthetic PCR primer
acgttggatgatttttcccggcatctgacc

SEQ ID NO: 336 - DNA, 30 bp, Artificial Sequence
  Synthetic PCR primer
acgttggatgtgcaaagtggtggaggaaag

SEQ ID NO: 337 - DNA, 30 bp, Artificial Sequence
  Synthetic PCR primer
acgttggatgtccaagaaggacagcagtag

SEQ ID NO: 338 - DNA, 30 bp, Artificial Sequence
  Synthetic PCR primer
acgttggatgatgagagcctttcttcaggg

SEQ ID NO: 339 - DNA, 31 bp, Artificial Sequence
  Synthetic PCR primer
acgttggatgatttgttaaaattcatagaac

SEQ ID NO: 340 - DNA, 30 bp, Artificial Sequence
  Synthetic PCR primer
acgttggatgtccccagtttgcatcttgac

SEQ ID NO: 341 - DNA, 30 bp, Artificial Sequence
  Synthetic PCR primer
acgttggatgaacccatgggaccacaattc

SEQ ID NO: 342 - DNA, 30 bp, Artificial Sequence
  Synthetic PCR primer
acgttggatgtaggatgggtgtttcctagc

SEQ ID NO: 343 - DNA, 30 bp, Artificial Sequence
  Synthetic PCR primer
acgttggatgtctgagggctctctctaatg

SEQ ID NO: 344 - DNA, 30 bp, Artificial Sequence
  Synthetic PCR primer
acgttggatgatgaaggaagaagccctgac

SEQ ID NO: 345 - DNA, 30 bp, Artificial Sequence
  Synthetic PCR primer
acgttggatgataatctatgtcctagattg

SEQ ID NO: 346 - DNA, 30 bp, Artificial Sequence
  Synthetic PCR primer
acgttggatgtagtagcattccaagtgccc

SEQ ID NO: 347 - DNA, 30 bp, Artificial Sequence
  Synthetic PCR primer
acgttggatggcaagaataggttctttcgc

SEQ ID NO: 348 - DNA, 30 bp, Artificial Sequence
  Synthetic PCR primer
acgttggatgacctccacactcattacctc

SEQ ID NO: 349 - DNA, 17 bp, Artificial Sequence
  Synthetic PCR primer
accagctctctttggat

SEQ ID NO: 350 - DNA, 17 bp, Artificial Sequence
  Synthetic PCR primer
atccagatggccctgac

SEQ ID NO: 351 - DNA, 22 bp, Artificial Sequence
  Synthetic PCR primer
tggttttcgaataagtagccac

SEQ ID NO: 352 - DNA, 17 bp, Artificial Sequence
  Synthetic PCR primer
aagccttcctatcccca

SEQ ID NO: 353 - DNA, 19 bp, Artificial Sequence
  Synthetic PCR primer
tgctttggggcagactgac

SEQ ID NO: 354 - DNA, 19 bp, Artificial Sequence
  Synthetic PCR primer
cacattgggtaaatgatga

SEQ ID NO: 355 - DNA, 17 bp, Artificial Sequence
  Synthetic PCR primer
aacctggttctgccatt

SEQ ID NO: 356 - DNA, 21 bp, Artificial Sequence
  Synthetic PCR primer
ccagtctagttttcgatcacc

SEQ ID NO: 357 - DNA, 20 bp, Artificial Sequence
  Synthetic PCR primer
ccccagtgatcctgagaaat

SEQ ID NO: 358 - DNA, 21 bp, Artificial Sequence
  Synthetic PCR primer
gacatcagacctatgccagga

SEQ ID NO: 359 - DNA, 20 bp, Artificial Sequence
  Synthetic PCR primer
cactcatgcctcaagccaat

SEQ ID NO: 360 - DNA, 17 bp, Artificial Sequence
  Synthetic PCR primer
aacaaccaactctccag

SEQ ID NO: 361 - DNA, 17 bp, Artificial Sequence
  Synthetic PCR primer
tcttggctcagtgctgc

SEQ ID NO: 362 - DNA, 17 bp, Artificial Sequence
  Synthetic PCR primer
ttggtcaacatcgcagc

SEQ ID NO: 363 - DNA, 21 bp, Artificial Sequence
  Synthetic PCR primer
gaagcccatcgctaagtgttt

SEQ ID NO: 364 - DNA, 19 bp, Artificial Sequence
  Synthetic PCR primer
ctctgactgaggagagacc

SEQ ID NO: 365 - DNA, 20 bp, Artificial Sequence
  Synthetic PCR primer
gacatgcatcaaagcagctg

SEQ ID NO: 366 - DNA, 22 bp, Artificial Sequence
  Synthetic PCR primer
tcttggagccatattttatttg

SEQ ID NO: 367 - DNA, 20 bp, Artificial Sequence
  Synthetic PCR primer
ttaaggataaagcaatccag

SEQ ID NO: 368 - DNA, 20 bp, Artificial Sequence
  Synthetic PCR primer
cgtcagcaaatgtgtaccga

SEQ ID NO: 369 - DNA, 23 bp, Artificial Sequence
  Synthetic PCR primer
catgaatgtgattcacattctcc

SEQ ID NO: 370 - DNA, 17 bp, Artificial Sequence
  Synthetic PCR primer
ttcccctcagctcttag

SEQ ID NO: 371 - DNA, 20 bp, Artificial Sequence
  Synthetic PCR primer
cttacccccaaagatgtcca

SEQ ID NO: 372 - DNA, 19 bp, Artificial Sequence
  Synthetic PCR primer
agccaggataatctcctca

SEQ ID NO: 373 - DNA, 17 bp, Artificial Sequence
  Synthetic PCR primer
tctacctccacttccaa

SEQ ID NO: 374 - DNA, 21 bp, Artificial Sequence
  Synthetic PCR primer
attcagatgggatcacagaag

SEQ ID NO: 375 - DNA, 23 bp, Artificial Sequence
  Synthetic PCR primer
gagctctgatagtgattgtgagt

SEQ ID NO: 376 - DNA, 20 bp, Artificial Sequence
  Synthetic PCR primer
taaacctttctatgttcctg

SEQ ID NO: 377 - DNA, 17 bp, Artificial Sequence
  Synthetic PCR primer
ctcaggtgatccaccca

SEQ ID NO: 378 - DNA, 17 bp, Artificial Sequence
  Synthetic PCR primer
tcccagaatttggagcc

SEQ ID NO: 379 - DNA, 18 bp, Artificial Sequence
  Synthetic PCR primer
caaaaggatctgcaaaag

SEQ ID NO: 380 - DNA, 18 bp, Artificial Sequence
  Synthetic PCR primer
catagggataggaatggg

SEQ ID NO: 381 - DNA, 21 bp, Artificial Sequence
  Synthetic PCR primer
atgtgggtttggactggggct

SEQ ID NO: 382 - DNA, 20 bp, Artificial Sequence
  Synthetic PCR primer
aggaaaggaatgtctgcccc

SEQ ID NO: 383 - DNA, 19 bp, Artificial Sequence
  Synthetic PCR primer
cagggccagccatgaacgt

SEQ ID NO: 384 - DNA, 24 bp, Artificial Sequence
  Synthetic PCR primer
ttcaataaaatgtactcattcaaa

SEQ ID NO: 385 - DNA, 17 bp, Artificial Sequence
  Synthetic PCR primer
tctctctaatggggacc

SEQ ID NO: 386 - DNA, 17 bp, Artificial Sequence
  Synthetic PCR primer
actggatcccagaagag

SEQ ID NO: 387 - DNA, 20 bp, Artificial Sequence
  Synthetic PCR primer
ccctgttctgcacctttaaa

SEQ ID NO: 388 - DNA, 17 bp, Artificial Sequence
  Synthetic PCR primer
tccttttttccccaccc

SEQ ID NO: 389 - DNA, 30 bp, Artificial Sequence
  Synthetic PCR primer
acgttggatgcatttcatattttgtagatc

SEQ ID NO: 390 - DNA, 30 bp, Artificial Sequence
  Synthetic PCR primer
acgttggatgtctcagccctctgataaaac

SEQ ID NO: 391 - DNA, 30 bp, Artificial Sequence
  Synthetic PCR primer
acgttggatgtgaaggttctggaggtatcg

SEQ ID NO: 392 - DNA, 30 bp, Artificial Sequence
  Synthetic PCR primer
acgttggatgtcttcttagccaagtctgcc

SEQ ID NO: 393 - DNA, 30 bp, Artificial Sequence
  Synthetic PCR primer
acgttggatgaacaacgcacaatatccccg

SEQ ID NO: 394 - DNA, 30 bp, Artificial Sequence
  Synthetic PCR primer
acgttggatggggtgaggtttatgggaatg

SEQ ID NO: 395 - DNA, 30 bp, Artificial Sequence; identical to SEQ ID NO: 393
  Synthetic PCR primer

SEQ ID NO: 396 - DNA, 30 bp, Artificial Sequence
  Synthetic PCR primer
acgttggatgcatttgccaaagtcttaggt

SEQ ID NO: 397 - DNA, 30 bp, Artificial Sequence
  Synthetic PCR primer
acgttggatgtgaacccttcaaaatcaccc

SEQ ID NO: 398 - DNA, 30 bp, Artificial Sequence
  Synthetic PCR primer
acgttggatgttgtgtttcatgggaggagg

SEQ ID NO: 399 - DNA, 31 bp, Artificial Sequence
  Synthetic PCR primer
acgttggatgcaacagattttccctgtagac

SEQ ID NO: 400 - DNA, 30 bp, Artificial Sequence
  Synthetic PCR primer
acgttggatgtgcattgacttctcctcagc

SEQ ID NO: 401 - DNA, 30 bp, Artificial Sequence
  Synthetic PCR primer
acgttggatggctgagcagaagctctttca

SEQ ID NO: 402 - DNA, 30 bp, Artificial Sequence
  Synthetic PCR primer
acgttggatgtgggcaaagacttcatgatt

SEQ ID NO: 403 - DNA, 31 bp, Artificial Sequence
  Synthetic PCR primer
acgttggatgcaactactacctagatgatga

SEQ ID NO: 404 - DNA, 33 bp, Artificial Sequence
  Synthetic PCR primer
acgttggatgaatagaaaatctaaattgtctac

SEQ ID NO: 405 - DNA, 30 bp, Artificial Sequence
  Synthetic PCR primer
acgttggatgagtatgaaggtcagggtcag

SEQ ID NO: 406 - DNA, 30 bp, Artificial Sequence
  Synthetic PCR primer
acgttggatgaaagagcactgaccatggag

SEQ ID NO: 407 - DNA, 30 bp, Artificial Sequence
  Synthetic PCR primer
acgttggatgtcagtcagagatcatagttc

SEQ ID NO: 408 - DNA, 31 bp, Artificial Sequence
  Synthetic PCR primer
acgttggatgcatgtagtgctttaacaaatg

SEQ ID NO: 409 - DNA, 30 bp, Artificial Sequence
  Synthetic PCR primer
acgttggatgcaacacatgcaccattagcg

SEQ ID NO: 410 - DNA, 30 bp, Artificial Sequence
  Synthetic PCR primer
acgttggatggaagccacaaacagatcagg

SEQ ID NO: 411 - DNA, 30 bp, Artificial Sequence
  Synthetic PCR primer
acgttggatgttgcttgcttgatgattggc

SEQ ID NO: 412 - DNA, 30 bp, Artificial Sequence
  Synthetic PCR primer
acgttggatgtcttctggactttagcactg

SEQ ID NO: 413 - DNA, 31 bp, Artificial Sequence
  Synthetic PCR primer
acgttggatgctataggactgtaaattgtag

SEQ ID NO: 414 - DNA, 30 bp, Artificial Sequence
  Synthetic PCR primer
acgttggatgtttttacacacatgctgtca

SEQ ID NO: 415 - DNA, 30 bp, Artificial Sequence
  Synthetic PCR primer
acgttggatgggccaacatggtaaaactcc

SEQ ID NO: 416 - DNA, 30 bp, Artificial Sequence
  Synthetic PCR primer
acgttggatgctgggataacaggtacttgc

SEQ ID NO: 417 - DNA, 30 bp, Artificial Sequence
  Synthetic PCR primer
acgttggatgtctcagctcatttccacctc

SEQ ID NO: 418 - DNA, 30 bp, Artificial Sequence
  Synthetic PCR primer
acgttggatgacctgtagtcccagctactc

SEQ ID NO: 419 - DNA, 30 bp, Artificial Sequence
  Synthetic PCR primer
acgttggatggaccaacatggtgaaatctc

SEQ ID NO: 420 - DNA, 30 bp, Artificial Sequence
  Synthetic PCR primer
acgttggatgtgagtagctgggactacagg

SEQ ID NO: 421 - DNA, 30 bp, Artificial Sequence
  Synthetic PCR primer
acgttggatgaagattatcaccgcactggg

SEQ ID NO: 422 - DNA, 30 bp, Artificial Sequence
  Synthetic PCR primer
acgttggatgatctcctgacctcgtgatcc

SEQ ID NO: 423 - DNA, 30 bp, Artificial Sequence
  Synthetic PCR primer
acgttggatgaggtttttggtatggttagc

SEQ ID NO: 424 - DNA, 30 bp, Artificial Sequence
  Synthetic PCR primer
acgttggatggaaaagggagttggcctaaa

SEQ ID NO: 425 - DNA, 30 bp, Artificial Sequence
  Synthetic PCR primer
acgttggatgagagagagagagagagagag

SEQ ID NO: 426 - DNA, 30 bp, Artificial Sequence
  Synthetic PCR primer
acgttggatgatgggctatagtgggatagg

SEQ ID NO: 427 - DNA, 30 bp, Artificial Sequence
  Synthetic PCR primer
acgttggatgacaccaaaagcaatggcaac

SEQ ID NO: 428 - DNA, 30 bp, Artificial Sequence
  Synthetic PCR primer
acgttggatggttgcctgttcactctgatg

SEQ ID NO: 429 - DNA, 30 bp, Artificial Sequence
  Synthetic PCR primer
acgttggatggagatctagcacatttatcc

SEQ ID NO: 430 - DNA, 30 bp, Artificial Sequence
  Synthetic PCR primer
acgttggatgaggttgcctgaaatgctaag

SEQ ID NO: 431 - DNA, 30 bp, Artificial Sequence
  Synthetic PCR primer
acgttggatggagatacctttgctaaggtg

SEQ ID NO: 432 - DNA, 30 bp, Artificial Sequence
  Synthetic PCR primer
acgttggatgggtagtaataatggtactcc

SEQ ID NO: 433 - DNA, 30 bp, Artificial Sequence
  Synthetic PCR primer
acgttggatgataagagagagtgtgggtgg

SEQ ID NO: 434 - DNA, 30 bp, Artificial Sequence
  Synthetic PCR primer
acgttggatgatttcctgacctcgtgatcc

SEQ ID NO: 435 - DNA, 30 bp, Artificial Sequence
  Synthetic PCR primer
acgttggatgtattgaattccctctgtatg

SEQ ID NO: 436 - DNA, 30 bp, Artificial Sequence
  Synthetic PCR primer
acgttggatgtcattcttttgagactgaac

SEQ ID NO: 437 - DNA, 30 bp, Artificial Sequence
  Synthetic PCR primer
acgttggatggctccaatgactaagtggac

SEQ ID NO: 438 - DNA, 30 bp, Artificial Sequence
  Synthetic PCR primer
acgttggatggacagaacactaagagccta

SEQ ID NO: 439 - DNA, 30 bp, Artificial Sequence
  Synthetic PCR primer
acgttggatgcttatcgaaatgaaatcaag

SEQ ID NO: 440 - DNA, 30 bp, Artificial Sequence
  Synthetic PCR primer
acgttggatgacagctgcaaacctaaggac

SEQ ID NO: 441 - DNA, 30 bp, Artificial Sequence
  Synthetic PCR primer
acgttggatgatctctaagtgagatagagg

SEQ ID NO: 442 - DNA, 30 bp, Artificial Sequence
  Synthetic PCR primer
acgttggatgcccagtcaaatgaaacccac

SEQ ID NO: 443 - DNA, 31 bp, Artificial Sequence
  Synthetic PCR primer
acgttggatggggaattctatattcccattg

SEQ ID NO: 444 - DNA, 32 bp, Artificial Sequence
  Synthetic PCR primer
acgttggatgcccaattccaacagaaaatatc

SEQ ID NO: 445 - DNA, 30 bp, Artificial Sequence
  Synthetic PCR primer
acgttggatgttgagacaagcctaggcaac

SEQ ID NO: 446 - DNA, 30 bp, Artificial Sequence
  Synthetic PCR primer
acgttggatggtgctgggattacaggtgtg

SEQ ID NO: 447 - DNA, 30 bp, Artificial Sequence
  Synthetic PCR primer
acgttggatgaaaagtgagagggcaatagg

SEQ ID NO: 448 - DNA, 30 bp, Artificial Sequence
  Synthetic PCR primer
acgttggatgcatagtaagtcaccacaagc

SEQ ID NO: 449 - DNA, 30 bp, Artificial Sequence
  Synthetic PCR primer
acgttggatgttctgtgggtcagatgtctc

SEQ ID NO: 450 - DNA, 30 bp, Artificial Sequence
  Synthetic PCR primer
acgttggatgagaaacagacttcctcccag

SEQ ID NO: 451 - DNA, 30 bp, Artificial Sequence
  Synthetic PCR primer
acgttggatgccaccatatcaacagatcag

SEQ ID NO: 452 - DNA, 30 bp, Artificial Sequence
  Synthetic PCR primer
acgttggatgcctgccagtatgctgagaat

SEQ ID NO: 453 - DNA, 30 bp, Artificial Sequence
  Synthetic PCR primer
acgttggatgtgagaaaaagcactcctggg

SEQ ID NO: 454 - DNA, 30 bp, Artificial Sequence
  Synthetic PCR primer
acgttggatgaggctgagacaggagaattg

SEQ ID NO: 455 - DNA, 30 bp, Artificial Sequence
  Synthetic PCR primer
acgttggatgcaggagaattgcttgaaccc

SEQ ID NO: 456 - DNA, 30 bp, Artificial Sequence; identical to SEQ ID NO: 453
  Synthetic PCR primer

SEQ ID NO: 457 - DNA, 30 bp, Artificial Sequence
  Synthetic PCR primer
acgttggatgaccactattgtttctttctc

SEQ ID NO: 458 - DNA, 30 bp, Artificial Sequence
  Synthetic PCR primer
acgttggatgggctaaagagtgaaaccctg

SEQ ID NO: 459 - DNA, 30 bp, Artificial Sequence
  Synthetic PCR primer
acgttggatggattgttttgagtcatctac

SEQ ID NO: 460 - DNA, 31 bp, Artificial Sequence
  Synthetic PCR primer
acgttggatgctgaaattgaccaggaaacac

SEQ ID NO: 461 - DNA, 30 bp, Artificial Sequence
  Synthetic PCR primer
acgttggatgggtggattggacaaacttgc

SEQ ID NO: 462 - DNA, 30 bp, Artificial Sequence
  Synthetic PCR primer
acgttggatgccttttgcttttcattgctc

SEQ ID NO: 463 - DNA, 30 bp, Artificial Sequence
  Synthetic PCR primer
acgttggatggatagcaagctacctaagac

SEQ ID NO: 464 - DNA, 30 bp, Artificial Sequence
  Synthetic PCR primer
acgttggatgcctccttactccactcaatc

SEQ ID NO: 465 - DNA, 30 bp, Artificial Sequence; identical to SEQ ID NO: 449
  Synthetic PCR primer

SEQ ID NO: 466 - DNA, 30 bp, Artificial Sequence
  Synthetic PCR primer
acgttggatgcaaagaaacagacttcctcc

SEQ ID NO: 467 - DNA, 30 bp, Artificial Sequence
  Synthetic PCR primer
acgttggatgtatgaggttctgccaccaag

SEQ ID NO: 468 - DNA, 30 bp, Artificial Sequence
  Synthetic PCR primer
acgttggatgtaccaaatctgagggtagtc

SEQ ID NO: 469 - DNA, 30 bp, Artificial Sequence
  Synthetic PCR primer
acgttggatgcaggagctgcttaattcctc

SEQ ID NO: 470 - DNA, 30 bp, Artificial Sequence
  Synthetic PCR primer
acgttggatggatcttgggcactaagtctc

SEQ ID NO: 471 - DNA, 31 bp, Artificial Sequence
  Synthetic PCR primer
acgttggatgcctctcctcatttctgtaaac

SEQ ID NO: 472 - DNA, 30 bp, Artificial Sequence
  Synthetic PCR primer
acgttggatgggcaggtggttagcattaag

SEQ ID NO: 473 - DNA, 30 bp, Artificial Sequence
  Synthetic PCR primer
acgttggatgttgggatctaggcatcaagg

SEQ ID NO: 474 - DNA, 30 bp, Artificial Sequence
  Synthetic PCR primer
acgttggatgaggaggcacataatgcttgg

SEQ ID NO: 475 - DNA, 30 bp, Artificial Sequence
  Synthetic PCR primer
acgttggatgacatacacacacacacacac

SEQ ID NO: 476 - DNA, 30 bp, Artificial Sequence
  Synthetic PCR primer
acgttggatggagacatacacctctgcaac

SEQ ID NO: 477 - DNA, 30 bp, Artificial Sequence
  Synthetic PCR primer
acgttggatgctcattacaacttcagccag

SEQ ID NO: 478 - DNA, 30 bp, Artificial Sequence
  Synthetic PCR primer
acgttggatgactcaggactaagctagttg

SEQ ID NO: 479 - DNA, 30 bp, Artificial Sequence
  Synthetic PCR primer
acgttggatgtctctctctctctctctctc

SEQ ID NO: 480 - DNA, 30 bp, Artificial Sequence
  Synthetic PCR primer
acgttggatgcagcccttagtactcaatgg

SEQ ID NO: 481 - DNA, 30 bp, Artificial Sequence
  Synthetic PCR primer
acgttggatgctgtcttatcccaacttaga

SEQ ID NO: 482 - DNA, 30 bp, Artificial Sequence
  Synthetic PCR primer
acgttggatggtcatgttacataccgaaac

SEQ ID NO: 483 - DNA, 30 bp, Artificial Sequence
  Synthetic PCR primer
acgttggatgggaggaatccatatataggc

SEQ ID NO: 484 - DNA, 30 bp, Artificial Sequence
  Synthetic PCR primer
acgttggatgctgctgaagggaatgagtac

SEQ ID NO: 485 - DNA, 30 bp, Artificial Sequence
  Synthetic PCR primer
acgttggatggtttacagtcccaccaacag

SEQ ID NO: 486 - DNA, 30 bp, Artificial Sequence
  Synthetic PCR primer
acgttggatgagtcaggaaacaacaggtgc

SEQ ID NO: 487 - DNA, 30 bp, Artificial Sequence
  Synthetic PCR primer
acgttggatgattgccacactgtcttccac

SEQ ID NO: 488 - DNA, 30 bp, Artificial Sequence
  Synthetic PCR primer
acgttggatgggatgtggagaaacaggaac

SEQ ID NO: 489 - DNA, 30 bp, Artificial Sequence
  Synthetic PCR primer
acgttggatgccatgtaagtctgtcattta

SEQ ID NO: 490 - DNA, 30 bp, Artificial Sequence
  Synthetic PCR primer
acgttggatgaagtggtagcagaagtgtgg

SEQ ID NO: 491 - DNA, 30 bp, Artificial Sequence
  Synthetic PCR primer
acgttggatgaagaagaggcatgcaaacag

SEQ ID NO: 492 - DNA, 30 bp, Artificial Sequence
  Synthetic PCR primer
acgttggatgctgcgacaaaagacacattc

SEQ ID NO: 493 - DNA, 30 bp, Artificial Sequence; identical to SEQ ID NO: 453
  Synthetic PCR primer

SEQ ID NO: 494 - DNA, 30 bp, Artificial Sequence
  Synthetic PCR primer
acgttggatgaggagaattgcttgaacccg

SEQ ID NO: 495 - DNA, 31 bp, Artificial Sequence
  Synthetic PCR primer
acgttggatgcgaggtaatgagcaaagtaag

SEQ ID NO: 496 - DNA, 31 bp, Artificial Sequence
  Synthetic PCR primer
acgttggatggacattaggttcatctaaccc

SEQ ID NO: 497 - DNA, 30 bp, Artificial Sequence
  Synthetic PCR primer
acgttggatgccagttttctatgacaaacg

SEQ ID NO: 498 - DNA, 30 bp, Artificial Sequence
  Synthetic PCR primer
acgttggatgaaagagcagggacagcaaag

SEQ ID NO: 499 - DNA, 30 bp, Artificial Sequence
  Synthetic PCR primer
acgttggatgactctaggtattttgactcc

SEQ ID NO: 500 - DNA, 30 bp, Artificial Sequence
  Synthetic PCR primer
acgttggatgaacttccatagtagaaagcc

SEQ ID NO: 501 - DNA, 30 bp, Artificial Sequence; identical to SEQ ID NO: 500
  Synthetic PCR primer

SEQ ID NO: 502 - DNA, 30 bp, Artificial Sequence; identical to SEQ ID NO: 499
  Synthetic PCR primer

SEQ ID NO: 503 - DNA, 30 bp, Artificial Sequence
  Synthetic PCR primer
acgttggatgagtggtttgctgcacctatc

SEQ ID NO: 504 - DNA, 30 bp, Artificial Sequence
  Synthetic PCR primer
acgttggatggggagagcattaggacaaac

SEQ ID NO: 505 - DNA, 30 bp, Artificial Sequence
  Synthetic PCR primer
acgttggatgatgagagaggacacaaagag

SEQ ID NO: 506 - DNA, 30 bp, Artificial Sequence
  Synthetic PCR primer
acgttggatgttactttgcacagtgtggcc

SEQ ID NO: 507 - DNA, 30 bp, Artificial Sequence
  Synthetic PCR primer
acgttggatgcaatcaagcagaaggatggg

SEQ ID NO: 508 - DNA, 30 bp, Artificial Sequence
  Synthetic PCR primer
acgttggatgggtgtcttcttatagttgtc

SEQ ID NO: 509 - DNA, 30 bp, Artificial Sequence; identical to SEQ ID NO: 507
  Synthetic PCR primer

SEQ ID NO: 510 - DNA, 30 bp, Artificial Sequence; identical to SEQ ID NO: 508
  Synthetic PCR primer

SEQ ID NO: 511 - DNA, 31 bp, Artificial Sequence
  Synthetic PCR primer
acgttggatggtgtagatgtgtatcaggtca

SEQ ID NO: 512 - DNA, 30 bp, Artificial Sequence
  Synthetic PCR primer
acgttggatggtccacaaagcatagcatcc

SEQ ID NO: 513 - DNA, 31 bp, Artificial Sequence
  Synthetic PCR primer
acgttggatgccctccttttaaccttttagg

SEQ ID NO: 514 - DNA, 30 bp, Artificial Sequence
  Synthetic PCR primer
acgttggatgttctgagatgatcctgatgg

SEQ ID NO: 515 - DNA, 30 bp, Artificial Sequence
  Synthetic PCR primer
acgttggatgcaggaggatatgtgaaagtc

SEQ ID NO: 516 - DNA, 30 bp, Artificial Sequence
  Synthetic PCR primer
acgttggatggtggataccaaaatccaagg

SEQ ID NO: 517 - DNA, 30 bp, Artificial Sequence
  Synthetic PCR primer
acgttggatgtgctgtataacagattaccc

SEQ ID NO: 518 - DNA, 30 bp, Artificial Sequence
  Synthetic PCR primer
acgttggatgaactagctagctaagcctcc

SEQ ID NO: 519 - DNA, 30 bp, Artificial Sequence
  Synthetic PCR primer
acgttggatgcctcaataggttgttggaac

SEQ ID NO: 520 - DNA, 30 bp, Artificial Sequence
  Synthetic PCR primer
acgttggatgttgagttcatactatgtgcc

SEQ ID NO: 521 - DNA, 30 bp, Artificial Sequence
  Synthetic PCR primer
acgttggatgagctctgcactctgacatac

SEQ ID NO: 522 - DNA, 30 bp, Artificial Sequence
  Synthetic PCR primer
acgttggatggtgcagagtactactttgcc

SEQ ID NO: 523 - DNA, 30 bp, Artificial Sequence
  Synthetic PCR primer
acgttggatgtgccatggggttgtaaaatc

SEQ ID NO: 524 - DNA, 30 bp, Artificial Sequence
  Synthetic PCR primer
acgttggatgacacagagaccagctgaaag

SEQ ID NO: 525 - DNA, 30 bp, Artificial Sequence
  Synthetic PCR primer
acgttggatggggaagaagcagattttgag

SEQ ID NO: 526 - DNA, 31 bp, Artificial Sequence
  Synthetic PCR primer
acgttggatgcataggttgagaacatcaagc

SEQ ID NO: 527 - DNA, 31 bp, Artificial Sequence
  Synthetic PCR primer
acgttggatgccatctctttgaaaattccac

SEQ ID NO: 528 - DNA, 31 bp, Artificial Sequence
  Synthetic PCR primer
acgttggatgccctcaagtacttgttttgtc

SEQ ID NO: 529 - DNA, 30 bp, Artificial Sequence
  Synthetic PCR primer
acgttggatgtaatgaagctgagtttattc

SEQ ID NO: 530 - DNA, 30 bp, Artificial Sequence
  Synthetic PCR primer
acgttggatggtttttgtttattggtgtcc

SEQ ID NO: 531 - DNA, 30 bp, Artificial Sequence
  Synthetic PCR primer
acgttggatgtcttttctcccatcatttcc

SEQ ID NO: 532 - DNA, 30 bp, Artificial Sequence
  Synthetic PCR primer
acgttggatgactcaatggttgcatgtagg

SEQ ID NO: 533 - DNA, 30 bp, Artificial Sequence
  Synthetic PCR primer
acgttggatgtgtttgctaaagctatgctg

SEQ ID NO: 534 - DNA, 30 bp, Artificial Sequence
  Synthetic PCR primer
acgttggatgtgagcattatgcctaagagc

SEQ ID NO: 535 - DNA, 30 bp, Artificial Sequence
  Synthetic PCR primer
acgttggatgcctttctagatacactccat

SEQ ID NO: 536 - DNA, 30 bp, Artificial Sequence
  Synthetic PCR primer
acgttggatgcagcatgtgtgtaaaaatgc

SEQ ID NO: 537 - DNA, 30 bp, Artificial Sequence
  Synthetic PCR primer
acgttggatgaggcaaattatttttggatg

SEQ ID NO: 538 - DNA, 31 bp, Artificial Sequence
  Synthetic PCR primer
acgttggatgctccctaaatggggaaaaaag

SEQ ID NO: 539 - DNA, 30 bp, Artificial Sequence; identical to SEQ ID NO: 409
  Synthetic PCR primer

SEQ ID NO: 540 - DNA, 30 bp, Artificial Sequence; identical to SEQ ID NO: 410
  Synthetic PCR primer

SEQ ID NO: 541 - DNA, 30 bp, Artificial Sequence
  Synthetic PCR primer
acgttggatgagcagtctattctggttcac

SEQ ID NO: 542 - DNA, 30 bp, Artificial Sequence
  Synthetic PCR primer
acgttggatggcctttgagctttaaaaatc

SEQ ID NO: 543 - DNA, 30 bp, Artificial Sequence
  Synthetic PCR primer
acgttggatgtaaagtagggactgggatgg

SEQ ID NO: 544 - DNA, 30 bp, Artificial Sequence
  Synthetic PCR primer
acgttggatggctgtagagtagtgaaaccc

SEQ ID NO: 545 - DNA, 30 bp, Artificial Sequence
  Synthetic PCR primer
acgttggatggttgccatattcagcagctg

SEQ ID NO: 546 - DNA, 30 bp, Artificial Sequence
  Synthetic PCR primer
acgttggatgctgtttccagtagaccttag

SEQ ID NO: 547 - DNA, 30 bp, Artificial Sequence
  Synthetic PCR primer
acgttggatgccagctaaaactgcaaatac

SEQ ID NO: 548 - DNA, 30 bp, Artificial Sequence
  Synthetic PCR primer
acgttggatgtggactcatttgagaatatg

SEQ ID NO: 549 - DNA, 30 bp, Artificial Sequence
  Synthetic PCR primer
acgttggatgtaaaaccccttcctcatccc

SEQ ID NO: 550 - DNA, 30 bp, Artificial Sequence
  Synthetic PCR primer
acgttggatgacctttagcagcctgaaacc

SEQ ID NO: 551 - DNA, 22 bp, Artificial Sequence
  Synthetic PCR primer
gcacataatgcttggttgtatt

SEQ ID NO: 552 - DNA, 19 bp, Artificial Sequence
  Synthetic PCR primer
cttgactttctaccttgaa

SEQ ID NO: 553 - DNA, 21 bp, Artificial Sequence
  Synthetic PCR primer
ctcttgactttctaccttgaa

SEQ ID NO: 554 - DNA, 20 bp, Artificial Sequence
  Synthetic PCR primer
acttagcggcttaaaacaac

SEQ ID NO: 555 - DNA, 22 bp, Artificial Sequence
  Synthetic PCR primer
ctgttcactctgatggtagttt

SEQ ID NO: 556 - DNA, 18 bp, Artificial Sequence
  Synthetic PCR primer
gtactatgtggcagatga

SEQ ID NO: 557 - DNA, 22 bp, Artificial Sequence
  Synthetic PCR primer
ggtactcctacttaaaattttg

SEQ ID NO: 558 - DNA, 19 bp, Artificial Sequence
  Synthetic PCR primer
gagggtagtcttgggaacc

SEQ ID NO: 559 - DNA, 17 bp, Artificial Sequence
  Synthetic PCR primer
ctctagtgagcttccct

SEQ ID NO: 560 - DNA, 24 bp, Artificial Sequence
  Synthetic PCR primer
agcattaagtattcatgagagttc

SEQ ID NO: 561 - DNA, 20 bp, Artificial Sequence
  Synthetic PCR primer
ggtctgttttatatgtgtgt

SEQ ID NO: 562 - DNA, 20 bp, Artificial Sequence
  Synthetic PCR primer
agctagttgcttcagtaagt

SEQ ID NO: 563 - DNA, 22 bp, Artificial Sequence
  Synthetic PCR primer
gtacagtcataacagttgttaa

SEQ ID NO: 564 - DNA, 20 bp, Artificial Sequence
  Synthetic PCR primer
tacataccgaaacacattcc

SEQ ID NO: 565 - DNA, 20 bp, Artificial Sequence
  Synthetic PCR primer
acattctatatggccccttg

SEQ ID NO: 566 - DNA, 18 bp, Artificial Sequence
  Synthetic PCR primer
ggagaggatgtggagaaa

SEQ ID NO: 567 - DNA, 17 bp, Artificial Sequence
  Synthetic PCR primer
ggtgggactgtaaacta

SEQ ID NO: 568 - DNA, 20 bp, Artificial Sequence
  Synthetic PCR primer
agaagtgtggacacagtatc

SEQ ID NO: 569 - DNA, 24 bp, Artificial Sequence
  Synthetic PCR primer
cacattcaactatacacgctttta

SEQ ID NO: 570 - DNA, 20 bp, Artificial Sequence
  Synthetic PCR primer
gtgagccgaaatcgtgccac

SEQ ID NO: 571 - DNA, 21 bp, Artificial Sequence
  Synthetic PCR primer
ttcatctaacccttttcataa

SEQ ID NO: 572 - DNA, 20 bp, Artificial Sequence
  Synthetic PCR primer
agcaaagctgaaaatgataa

SEQ ID NO: 573 - DNA, 23 bp, Artificial Sequence
  Synthetic PCR primer
caataaataatagcaaagactgg

SEQ ID NO: 574 - DNA, 22 bp, Artificial Sequence
  Synthetic PCR primer
tgtttatattgctgtttcttga

SEQ ID NO: 575 - DNA, 17 bp, Artificial Sequence
  Synthetic PCR primer
ctcatgtggggcttaaa

SEQ ID NO: 576 - DNA, 17 bp, Artificial Sequence
  Synthetic PCR primer
gtgtggccattttcact

SEQ ID NO: 577 - DNA, 24 bp, Artificial Sequence
  Synthetic PCR primer
tgttagatagaggtttatcatttt

SEQ ID NO: 578 - DNA, 21 bp, Artificial Sequence
  Synthetic PCR primer
tttttcctgcaatagttttct

SEQ ID NO: 579 - DNA, 19 bp, Artificial Sequence
  Synthetic PCR primer
atacttatgctctgctacc

SEQ ID NO: 580 - DNA, 22 bp, Artificial Sequence
  Synthetic PCR primer
atggttttctttcttgtccttc

SEQ ID NO: 581 - DNA, 22 bp, Artificial Sequence
  Synthetic PCR primer
ggatgctcaagtcccttatata

SEQ ID NO: 582 - DNA, 17 bp, Artificial Sequence
  Synthetic PCR primer
gcctcccagattgctga

SEQ ID NO: 583 - DNA, 21 bp, Artificial Sequence
  Synthetic PCR primer
tgtgccaaatatttgctagat

SEQ ID NO: 584 - DNA, 20 bp, Artificial Sequence
  Synthetic PCR primer
actactttgcctgtgtgtca

SEQ ID NO: 585 - DNA, 18 bp, Artificial Sequence
  Synthetic PCR primer
accagctgaaagaaaatc

SEQ ID NO: 586 - DNA, 24 bp, Artificial Sequence
  Synthetic PCR primer
aagcttagtatgtccaaatctaac

SEQ ID NO: 587 - DNA, 24 bp, Artificial Sequence
  Synthetic PCR primer
gtgtgtaaaaatgcattccaagtt

SEQ ID NO: 588 - DNA, 20 bp, Artificial Sequence
  Synthetic PCR primer
cccccgaaatgtttcaaagg

SEQ ID NO: 589 - DNA, 22 bp, Artificial Sequence
  Synthetic PCR primer
ccacaaacagatcaggttggtg

SEQ ID NO: 590 - DNA, 23 bp, Artificial Sequence
  Synthetic PCR primer
agtatgtaaaaagatagggaaga

SEQ ID NO: 591 - DNA, 20 bp, Artificial Sequence
  Synthetic PCR primer
gagtagtgaaacccctgacc

SEQ ID NO: 592 - DNA, 23 bp, Artificial Sequence
  Synthetic PCR primer
cagtagaccttagtttcttaacc

SEQ ID NO: 593 - DNA, 24 bp, Artificial Sequence
  Synthetic PCR primer
gagaatatgataaaagctcagacc

SEQ ID NO: 594 - DNA, 17 bp, Artificial Sequence
  Synthetic PCR primer
gtttctgtctctggcga

SEQ ID NO: 595 - DNA, 23 bp, Artificial Sequence
  Synthetic PCR primer
ggatacaagttatgctttgatag

SEQ ID NO: 596 - DNA, 17 bp, Artificial Sequence
  Synthetic PCR primer
tccaatggctcactcag

SEQ ID NO: 597 - DNA, 19 bp, Artificial Sequence
  Synthetic PCR primer
ggaggaggtcaaaatatca

SEQ ID NO: 598 - DNA, 20 bp, Artificial Sequence
  Synthetic PCR primer
gacttctcctcagctatgaa

SEQ ID NO: 599 - DNA, 23 bp, Artificial Sequence
  Synthetic PCR primer
tgattaaaacaccaaaagcaatt

SEQ ID NO: 600 - DNA, 23 bp, Artificial Sequence
  Synthetic PCR primer
aatctaaattgtctactgaaact

SEQ ID NO: 601 - DNA, 18 bp, Artificial Sequence
  Synthetic PCR primer
ccatggagttgtaaggaa

SEQ ID NO: 602 - DNA, 23 bp, Artificial Sequence
  Synthetic PCR primer
tagtgctttaacaaatgctgtca

SEQ ID NO: 603 - DNA, 21 bp, Artificial Sequence
  Synthetic PCR primer
cacaaacagatcaggttggtg

SEQ ID NO: 604 - DNA, 20 bp, Artificial Sequence
  Synthetic PCR primer
gaattggggagagaaaggga

SEQ ID NO: 605 - DNA, 24 bp, Artificial Sequence
  Synthetic PCR primer
cctggcaaattttggtatttttag

SEQ ID NO: 606 - DNA, 17 bp, Artificial Sequence
  Synthetic PCR primer
gcgggagaatggcatga

SEQ ID NO: 607 - DNA, 17 bp, Artificial Sequence
  Synthetic PCR primer
gctcaccaccacacctg

SEQ ID NO: 608 - DNA, 19 bp, Artificial Sequence
  Synthetic PCR primer
aaagtgctgggattacagg

SEQ ID NO: 609 - DNA, 23 bp, Artificial Sequence
  Synthetic PCR primer
tggcctaaaaatatttttaccgt

SEQ ID NO: 610 - DNA, 20 bp, Artificial Sequence
  Synthetic PCR primer
caactgtttaacaaccaggc

SEQ ID NO: 611 - DNA, 17 bp, Artificial Sequence
  Synthetic PCR primer
agagtgctgggattaca

SEQ ID NO: 612 - DNA, 22 bp, Artificial Sequence
  Synthetic PCR primer
cttttgagactgaacacctcta

SEQ ID NO: 613 - DNA, 23 bp, Artificial Sequence
  Synthetic PCR primer
agaacactaagagcctagaatgg

SEQ ID NO: 614 - DNA, 19 bp, Artificial Sequence
  Synthetic PCR primer
agtatgcagagacttacag

SEQ ID NO: 615 - DNA, 17 bp, Artificial Sequence
  Synthetic PCR primer
aacccaccattcctatg

SEQ ID NO: 616 - DNA, 22 bp, Artificial Sequence
  Synthetic PCR primer
cacaaaatacctccaaatttta

SEQ ID NO: 617 - DNA, 17 bp, Artificial Sequence
  Synthetic PCR primer
ttacaggtgtgagccac

SEQ ID NO: 618 - DNA, 17 bp, Artificial Sequence
  Synthetic PCR primer
caccacaagccacttga

SEQ ID NO: 619 - DNA, 17 bp, Artificial Sequence
  Synthetic PCR primer
cttcctcccagagccac

SEQ ID NO: 620 - DNA, 22 bp, Artificial Sequence
  Synthetic PCR primer
tcataggtaatgtggattttgt

SEQ ID NO: 621 - DNA, 17 bp, Artificial Sequence
  Synthetic PCR primer
ttgcttgaacccgggag

SEQ ID NO: 622 - DNA, 19 bp, Artificial Sequence
  Synthetic PCR primer
tcggctcactgcaatctct

SEQ ID NO: 623 - DNA, 18 bp, Artificial Sequence
  Synthetic PCR primer
ttctcgcaaagagaaaac

SEQ ID NO: 624 - DNA, 21 bp, Artificial Sequence
  Synthetic PCR primer
ggaattagcagtcatttctta

SEQ ID NO: 625 - DNA, 23 bp, Artificial Sequence
  Synthetic PCR primer
atttctctagactttgctacaat

SEQ ID NO: 626 - DNA, 17 bp, Artificial Sequence
  Synthetic PCR primer
agttcatccttcaggaa

SEQ ID NO: 627 - DNA, 17 bp, Artificial Sequence
  Synthetic PCR primer
agacttcctcccagagc

SEQ ID NO: 628 - DNA, 23 bp, Artificial Sequence
  Synthetic PCR primer
gttttgtcttcaaatagtaaaga

SEQ ID NO: 629 - DNA, 22 bp, Artificial Sequence
  Synthetic PCR primer
tccatttttatttgcagaagac

SEQ ID NO: 630 - DNA, 17 bp, Artificial Sequence
  Synthetic PCR primer
attggatttggcgtagc

SEQ ID NO: 631 - DNA, 17 bp, Artificial Sequence
  Synthetic PCR primer
agcagtaggcaacttct

SEQ ID NO: 632 - DNA, 30 bp, Artificial Sequence; identical to SEQ ID NO: 389
  Synthetic PCR primer

SEQ ID NO: 633 - DNA, 30 bp, Artificial Sequence; identical to SEQ ID NO: 390
  Synthetic PCR primer

SEQ ID NO: 634 - DNA, 23 bp, Artificial Sequence
  Synthetic PCR primer
ggatacaagttatgctttgatag
